(19) United States
(12) Patent Application Publication
(10) Pub. No.: US 2003/0118592 A1
(43) Pub. Date: Jun. 26, 2003

(54) Binding domain-immunoglobulin fusion proteins

(75) Inventors: Jeffrey A. Ledbetter, Shoreline, WA (US); Martha S. Hayden-Ledbetter, Shoreline, WA (US); Peter A. Thompson, Danville, CA (US)

Correspondence Address: SEED INTELLECTUAL PROPERTY LAW GROUP PLLC, 701 FIFTH AVE, SUITE 6300, SEATTLE, WA, 98104-7092, US

(73) Assignee: Genecraft, Inc., Shoreline, WA

(21) Appl. No.: 10/207,655

(22) Filed: Jul. 25, 2002

Related U.S. Application Data
(63) Continuation-in-part of application No. 10/053,530, filed on Jan. 17, 2002.
(60) Provisional application No. 60/367,358, filed on Jan. 17, 2001.
(60) Provisional application No. 60/385,691, filed on Jun. 3, 2002.

(51) Int. Cl. A61K 39/395; C07K 16/46

(52) U.S. Cl. 424/178.1; 530/391.1

(57) ABSTRACT

The invention relates to novel binding domain-immunoglobulin fusion proteins that feature a binding domain for a cognate structure such as an antigen, a counterreceptor or the like, a wild-type IgG1, IGA or IgE hinge region polypeptide or a mutant IgG1 hinge region polypeptide having either zero, one or two cysteine residues, and immunoglobulin CH2 and CH3 domains, and that are capable of ADCC and/or CDC while occurring predominantly as polypeptides that are compromised in their ability to form disulfide-linked multimers. The fusion proteins can be recombinantly produced at high expression levels. Also provided are related compositions and methods, including cell surface forms of the fusion proteins and immunotherapeutic applications of the fusion proteins and of polynucleotides encoding such fusion proteins.

### CROSS REFERENCE TO RELATED APPLICATIONS

[0001] This application is a Continuation-in-Part of U.S. Ser. No. 10/053,530, filed Jan. 17, 2002, which is incorporated herein by reference in its entirety and which claims the benefit of priority of U.S. Provisional Application No. 60/367,358 (formerly U.S. Ser. No. 09/765,208, filed Jan. 17, 2001), also incorporated herein by reference in its entirety and for which a Petition to Convert a Non-Provisional Application to a Provisional Application was filed on Jan. 16, 2002, and granted on Jun. 6, 2002. This application also claims the benefit of priority of U.S. Provisional Application No. 60/385,691 filed on Jun. 3, 2002, and entitled “Recombinant Signaling Receptors for Tumor Gene Therapy”, which is also incorporated herein by reference in its entirety.

### BACKGROUND OF THE INVENTION

[0002] The present invention relates generally to immunologically active, recombinant binding proteins, and in particular, to molecularly engineered binding domain-immunoglobulin fusion proteins, including single chain Fv-immunoglobulin fusion proteins. The present invention also relates to compositions and methods for treating malignant conditions and B-cell disorders, including diseases characterized by autoantibody production.

[0003] An immunoglobulin molecule is a multimeric protein composed of two identical light chain polypeptides and two identical heavy chain polypeptides (H₂L₂) that are joined into a macromolecular complex by interchain disulfide bonds. Intrachain disulfide bonds join different areas of the same polypeptide chain, which results in the formation of loops that, along with adjacent amino acids, constitute the immunoglobulin domains. At the amino-terminal portion, each light chain and each heavy chain has a single variable region that shows considerable variation in amino acid composition from one antibody to another. The light chain variable region, V_{L}, associates with the variable region of a heavy chain, V_{H}, to form the antigen binding site of the immunoglobulin, Fv. Light chains have a single constant region domain and heavy chains have several constant region domains. Classes IgG, IgA, and IgD have three constant region domains, which are designated CH1, CH2, and CH3, and the IgM and IgE classes have four constant region domains, CH1, CH2, CH3 and CH4. Immunoglobulin structure and function are reviewed, for example, in Harlow et al., Eds., Antibodies: A Laboratory Manual, Chapter 14, Cold Spring Harbor Laboratory, Cold Spring Harbor (1988).

[0004] The heavy chains of immunoglobulins can be divided into three functional regions: Fd (fragment comprising VH and CH1), hinge, and Fc (fragment crystallizable, derived from constant regions). The Fd region comprises the V_{H} and CH1 domains and in combination with the light chain forms Fab, the antigen-binding fragment. The Fc fragment is generally considered responsible for the effector functions of an immunoglobulin, such as complement fixation and binding to Fc receptors. The hinge region, found in IgG, IgA, and IgD classes, acts as a flexible spacer, allowing the Fab portion to move freely in space. In contrast to the constant regions, the hinge domains are structurally diverse, varying in both sequence and length among immunoglobulin classes and subclasses. For example, three human IgG subclasses, IgG1, IgG2, and IgG4, have hinge regions of 12-15 amino acids, while IgG3-derived hinge regions can comprise approximately 62 amino acids, including around 21 proline residues and around 11 cysteine residues.

[0005] According to crystallographic studies, the immunoglobulin hinge region can be further subdivided functionally into three regions: the upper hinge, the core, and the lower hinge (Shin et al., Immunological Reviews 130:87 (1992)). The upper hinge includes amino acids from the carboxyl end of CH1 to the first residue in the hinge that restricts motion, generally the first cysteine residue that forms an interchain disulfide bond between the two heavy chains. The length of the upper hinge region correlates with the segmental flexibility of the antibody. The core hinge region contains the inter-heavy chain disulfide bridges, and the lower hinge region joins the amino terminal end of the CH2 domain and includes residues in CH2. (Id.) The core hinge region of human IgG1 contains the sequence Cys-Pro-Pro-Cys which, when dimerized by disulfide bond formation, results in a cyclic octapeptide believed to act as a pivot, thus conferring flexibility. The hinge region may also contain one or more glycosylation sites, which include a number of structurally distinct types of sites for carbohydrate attachment. For example, IgA1 contains five glycosylation sites within a 17 amino acid segment of the hinge region, conferring exceptional resistance of the hinge region polypeptide to intestinal proteases, considered an advantageous property for a secretory immunoglobulin.

[0006] Conformational changes permitted by the structure and flexibility of the immunoglobulin hinge region polypeptide sequence may affect the effector functions of the Fc portion of the antibody. Three general categories of effector functions associated with the Fc region include (1) activation of the classical complement cascade, (2) interaction with effector cells, and (3) compartmentalization of immunoglobulins. The different human IgG subclasses vary in the relative efficacies with which they fix complement, or activate and amplify the steps of the complement cascade (e.g., Kirschfink, 2001 Immunol. Rev. 180:177; Chakraborti et al., 2000 Cell Signal 12:607; Kohl et al., 1999 Mol. Immunol. 36:893; Marsh et al., 1999 Curr. Opin. Nephrol. Hypertens. 8:557; Speth et al., 1999 Wien Klin. Wochenschr. 111:378). Complement-dependent cytotoxicity (CDC) is believed to be a significant mechanism for clearance of specific target cells such as tumor cells. In general, IgG1 and IgG3 most effectively fix complement, IgG2 is less effective, and IgG4 does not activate complement. Complement activation is initiated by binding of C1q, a subunit of the first component C1 in the cascade, to an antigen-antibody complex. Even though the binding site for C1q is located in the CH2 domain of the antibody, the hinge region influences the ability of the antibody to activate the cascade. For example, recombinant immunoglobulins lacking a hinge region are unable to activate complement. (Shin et al., 1992) Without the flexibility conferred by the hinge region, the Fab portion of the antibody bound to the antigen may not be able to adopt the conformation required to permit C1q to bind to CH2. (See id.) Hinge length and segmental flexibility have been correlated with complement activation; however, the correlation is not absolute. Human IgG3 molecules with altered hinge regions that are as rigid as IgG4 can still effectively activate the cascade.

[0007] The absence of a hinge region, or a lack of a functional hinge region, can also affect the ability of certain human IgG immunoglobulins to bind Fc receptors on immune effector cells. Binding of an immunoglobulin to an Fc receptor facilitates antibody-dependent cell-mediated cytotoxicity (ADCC), which is presumed to be an important mechanism for the elimination of tumor cells. The human IgG Fc receptor (FcR) family is divided into three groups, FcγRI (CD64), which is capable of binding IgG with high affinity, and FcγRII (CD32) and FcγRIII (CD16), both of which are low affinity receptors. The molecular interaction between each of the three receptors and an immunoglobulin has not been defined precisely, but experimental evidence indicates that residues in the hinge proximal region of the CH2 domain are important to the specificity of the interaction between the antibody and the Fc receptor. In addition, IgG1 myeloma proteins and recombinant IgG3 chimeric antibodies that lack a hinge region are unable to bind FcγRI, likely because accessibility to CH2 is decreased. (Shin et al., Intern. Rev. Immunol. 10:177, 178-79 (1993)).

[0008] Unusual and apparently evolutionarily unrelated exceptions to the H₂L₂ structure of conventional antibodies occur in some isotypes of the immunoglobulins found in camelids (Hamers-Casterman et al., 1993 Nature 363:446; Nguyen et al., 1998 J. Mol. Biol 275:413) and in nurse sharks (Roux et al., 1998 Proc. Nat. Acad. Sci. USA 95:11804). These antibodies form their antigen-binding pocket using the heavy chain variable region alone. In both species, these variable regions often contain an extended third complementarity determining region (CDR3) to help compensate for the lack of a light chain variable region, and there are frequent disulfide bonds between CDR regions to help stabilize the binding site [Muyldermans et al., 1994 Prot. Engineer. 7:1129; Roux et al., 1998]. However, the function of the heavy chain-only antibodies is unknown, and the evolutionary pressure leading to their formation has not been identified. Since camelids, including camels, llamas, and alpacas, also express conventional H₂L₂ antibodies, the heavy chain-only antibodies do not appear to be present in these animals simply as an alternative antibody structure.

[0009] Variable regions (V_{H}H) of the camelid heavy chain-only immunoglobulins contain amino acid substitutions at several positions outside of the CDR regions when compared with conventional (H₂L₂) heavy chain variable regions. These amino acid substitutions are encoded in the germ line [Nguyen et al., 1998 J. Mol. Biol 275:413] and are located at residues that normally form the hydrophobic interface between conventional V_{H} and V_{L} domains [Muyldermans et al., 1994 Prot. Engineer. 7:1129]. Camelid V_{H}H recombine with IgG2 and IgG3 constant regions that contain hinge, CH2, and CH3 domains but which lack a CH1 domain [Hamers-Casterman et al., 1993 Nature 363:446]. Interestingly, V_{H}H are encoded by a chromosomal locus distinct from the V_{H} locus [Nguyen, 1998], indicating that camelid B cells have evolved complex mechanisms of antigen recognition and differentiation. Thus, for example, llama IgG1 is a conventional (H₂L₂) antibody isotype in which V_{H} recombines with a constant region that contains hinge, CH1, CH2 and CH3 domains, whereas the llama IgG2 and IgG3 are heavy chain-only isotypes that lack CH1 domains and that contain no light chains.

[0010] Monoclonal antibody technology and genetic engineering methods have led to rapid development of immunoglobulin molecules for diagnosis and treatment of human diseases. Protein engineering has been applied to improve the affinity of an antibody for its cognate antigen, to diminish problems related to immunogenicity of administered recombinant polypeptides, and to alter antibody effector functions. The domain structure of immunoglobulins is amenable to recombinant engineering, in that the antigen binding domains and the domains conferring effector functions may be exchanged between immunoglobulin classes (e.g., IgG, IgA, IgE) and subclasses (e.g., IgG1, IgG2, IgG3, etc.).

[0011] In addition, smaller immunoglobulin molecules have been constructed to overcome problems associated with whole immunoglobulin therapy. For instance, single chain immunoglobulin variable region fragment polypeptides (scFv) comprise an immunoglobulin heavy chain variable domain joined via a short linker peptide to an immunoglobulin light chain variable domain (Huston et al. Proc. Natl. Acad. Sci. USA, 85: 5879-83, 1988). Because of the small size of scFv molecules, they exhibit very rapid clearance from plasma and tissues and are capable of more effective penetration into tissues than whole immunoglobulins. (see, e.g., Jain, 1990 Cancer Res. 50:814s-819s.) An anti-tumor scFv showed more rapid tumor penetration and more even distribution through the tumor mass than the corresponding chimeric antibody (Yokota et al., Cancer Res. 52, 3402-08 (1992)). Fusion of an scFv to another molecule, such as a toxin, takes advantage of the specific antigen-binding activity and the small size of an scFv to deliver the toxin to a target tissue. (Chaudary et al., Nature 339:394 (1989); Batra et al., Mol. Cell. Biol. 11:2200 (1991)).

[0012] Despite the advantages that scFv molecules bring to serotherapy, several drawbacks to this therapeutic approach exist. While rapid clearance of scFv may reduce toxic effects in normal cells, such rapid clearance may prevent delivery of a minimum effective dose to the target tissue. Manufacturing adequate amounts of scFv for administration to patients has been challenging due to difficulties in expression and isolation of scFv that adversely affect the yield. During expression, scFv molecules lack stability and often aggregate due to pairing of variable regions from different molecules. Furthermore, production levels of scFv molecules in mammalian expression systems are low, limiting the potential for efficient manufacturing of scFv molecules for therapy (Davis et al, J. Biol. Chem. 265:10410-18 (1990); Traunecker et al., EMBO J. 10: 3655-59 (1991)). Strategies for improving production have been explored, including addition of glycosylation sites to the variable regions (e.g., U.S. Pat. No. 5,888,773; Jost et al, J. Biol. Chem. 269: 26267-73 (1994)).

[0013] An additional disadvantage to using scFv for therapy is the lack of effector function. An scFv that lacks the cytolytic functions, ADCC and complement dependent-cytotoxicity (CDC), which are typically associated with immunoglobulin constant regions, may be ineffective for treating disease. Even though development of scFv technology began over 12 years ago, currently no scFv products are approved for therapy. Conjugation or fusion of toxins to scFV has thus been an alternative strategy to provide a potent, antigen-specific molecule, but dosing with such conjugates or chimeras is often limited by excessive and/or non-specific toxicity having its origin in the toxin moiety of such preparations. Toxic effects may include supraphysiological elevation of liver enzymes and vascular leak syndrome, and other undesired effects. In addition, immunotoxins are themselves highly immunogenic after being administered to a host, and host antibodies generated against the immunotoxin limit its potential usefulness in repeated therapeutic treatments of an individual.

[0014] The benefits of immunoglobulin constant region-associated effector functions in the treatment of disease has prompted development of fusion proteins in which immunoglobulin constant region polypeptide sequences are present and nonimmunoglobulin sequences are substituted for the antibody variable region. For example, CD4, the T cell surface protein recognized by HIV, was recombinantly fused to an immunoglobulin Fc effector domain. (See Sensel et al., Chem. Immunol 65:129-158 (1997)). The biological activity of such a molecule will depend in part on the class or subclass of the constant region chosen. An IL-2-IgG1 fusion protein effected complement-mediated lysis of IL-2 receptor-bearing cells. (See id.). Use of immunoglobulin constant regions to construct these and other fusion proteins may also confer improved pharmacokinetic properties.

[0015] Diseases and disorders thought to be amenable to some type of immunoglobulin therapy include cancer and immune system disorders. Cancer includes a broad range of diseases, affecting approximately one in four individuals worldwide. Rapid and unregulated proliferation of malignant cells is a hallmark of many types of cancer, including hematological malignancies. Patients with a hematologic malignant condition have benefited most from advances in cancer therapy in the past two decades (Multani et al., J. Clin. Oncology 16: 3691-3710, 1998). Although remission rates have increased, most patients still relapse and succumb to their disease. Barriers to cure with cytotoxic drugs include tumor cell resistance and the high toxicity of chemotherapy, which prevents optimal dosing in many patients. New treatments based on targeting with molecules that specifically bind to a malignant cell, including monoclonal antibodies (mAbs), can improve effectiveness without increasing toxicity.

[0016] Since monoclonal antibodies (mAb) were first described in 1975 (Kohler et al., Nature 256:495-97 (1975)), many patients have been treated with mAbs that specifically bind to tumor antigens, or antigens expressed on tumor cells. These studies have yielded important lessons regarding the selection of tumor cell surface antigens that are tumor antigens suitable for use as immunotherapy targets. First, it is highly preferable that such a target antigen is not expressed by normal tissues the preservation of which is important to host survival. Fortunately, in the case of hematologic malignancy, malignant cells express many antigens that are not expressed on the surfaces of stem cells or other essential cells. Treatment of a hematologic malignant condition using a therapeutic regimen that depletes both normal and malignant cells of hematological origin has been acceptable where regeneration of normal cells from progenitors can occur after therapy has ended. Second, the target antigen should be expressed on all or virtually all clonogenic populations of tumor cells, and expression should persist despite the selective pressure from immunoglobulin therapy. Thus, a strategy that employs selection of a cell surface idiotype (e.g., a particular idiotope) as a target for therapy of B cell malignancy has been limited by the outgrowth of tumor cell variants with altered surface idiotype expression, even where the antigen exhibits a high degree of tumor selectivity (Meeker et al., N. Engl. J. Med. 312:1658-65 (1985)). Third, the selected antigen must traffic properly after an immunoglobulin binds to it. Shedding or internalization of a cell surface target antigen after an immunoglobulin binds to the antigen may allow tumor cells to escape destruction, thus limiting the effectiveness of serotherapy. Fourth, binding of an immunoglobulin to cell surface target antigens that transmit or transduce cellular activation signals may result in improved functional responses to immunotherapy in tumor cells, and can lead to growth arrest and/or apoptosis. While all of these properties are important, the triggering of apoptosis after an immunoglobulin binds to the target antigen may be a critical factor in achieving successful serotherapy.

[0017] Antigens that have been tested as targets for serotherapy of B and T cell malignancies include Ig idiotype (Brown et al., Blood 73:651-61 (1989)), CD19 (Hekman et al., Cancer Immunol. Immunother. 32:364-72 (1991); Vlasveld et al., Cancer Immunol. Immunother. 40: 37-47 (1995)), CD20 (Press et al., Blood 69: 584-91 (1987); Maloney et al., J. Clin. Oncol. 15:3266-74, (1997)) CD21 (Scheinberg et. al., J. Clin. Oncol. 8:792-803, (1990)), CD5 (Dillman et. al., J. Biol. Respn. Mod. 5:394-410 (1986)), and CD52 (CAMPATH) (Pawson et al., J. Clin. Oncol. 15:2667-72, (1997)). Of these, the most success has been obtained using CD20 as a target for therapy of B cell lymphomas. Each of the other targets has been limited by the biological properties of the antigen. For example, surface idiotype can be altered through somatic mutation, allowing tumor cell escape. As other examples, CD5, CD21, and CD19 are rapidly internalized after mAb binding, allowing tumor cells to escape destruction unless mAbs are conjugated with toxin molecules. CD22 is expressed on only a subset of B cell lymphomas, thereby limiting its usefulness, while CD52 is expressed on both T cells and B cells and may therefore generate counterproductive immunosuppression by effecting selective T cell depletion.

[0018] CD20 fulfills the basic criteria described above for selection of an appropriate target antigen for therapy of a B cell malignant condition. Treatment of patients with low grade or follicular B cell lymphoma using chimeric CD20 mAb induces partial or complete responses in many patients (McLaughlin et al, Blood 88:90a (abstract, suppl. 1) (1996); Maloney et al, Blood 90: 2188-95 (1997)). However, tumor relapse commonly occurs within six months to one year. Therefore, further improvements in serotherapy are needed to induce more durable responses in low grade B cell lymphoma, and to allow effective treatment of high grade lymphoma and other B cell diseases.

[0019] One approach to improving CD20 serotherapy has been to target radioisotopes to B cell lymphomas using mAbs specific for CD20. While the effectiveness of therapy is increased, associated toxicity from the long in vivo half-life of the radioactive antibody increases also, sometimes requiring that the patient undergo stem cell rescue (Press et al., N. Eng. J. Med. 329: 1219-1224, 1993; Kaminski et al., N. Eng. J. Med. 329:459-65 (1993)). MAbs to CD20 have been cleaved with proteases to yield F(ab′)₂ or Fab fragments prior to attachment of the radioisotope. This improves penetration of the radioisotope conjugate into the tumor, and shortens the in vivo half-life, thus reducing the toxicity to normal tissues. However, the advantages of effector functions, including complement fixation and/or ADCC that would otherwise be provided by the Fc region of the CD20 mAb, are lost since the Fab preparations lack immunoglogulin Fc domains. Therefore, for improved delivery of radioisotopes, a strategy is needed to make a CD20 mAb derivative that retains Fc-dependent effector functions but which is smaller in size, thereby increasing tumor penetration and shortening mAb half-life.

[0020] CD20 was the first human B cell lineage-specific surface molecule identified by a monoclonal antibody, but the function of CD20 in B cell biology is still incompletely understood. CD20 is a non-glycosylated, hydrophobic 35 kDa B cell transmembrane phosphoprotein that has both amino and carboxy ends situated in the cytoplasm (Einfeld et al, EMBO J. 7:711-17 (1988)). Natural ligands for CD20 have not been identified. CD20 is expressed by all normal mature B cells, but is not expressed by precursor B cells.

[0021] CD20 mAbs deliver signals to normal B cells that affect viability and growth (Clark et al., Proc. Natl. Acad. Sci. USA 83:4494-98 (1986)), and extensive cross-linking of CD20 can induce apoptosis in B lymphoma cell lines (Shan et al., Blood 91:1644-52 (1998)). Cross-linking of CD20 on the cell surface increases the magnitude and enhances the kinetics of signal transduction, for example, as detected by measuring tyrosine phosphorylation of cellular substrates (Deans et al., J. Immunol. 146:846-53 (1993)). Significantly, apoptosis in Ramos B lymphoma cells can also be induced by FcR cross-linking CD20 mAbs bound to the Ramos cell surfaces, by the addition of Fc-receptor positive cells (Shan et al., Blood 91: 1644-52 (1998)). Therefore, in addition to cellular depletion by complement and ADCC mechanisms, Fc-receptor binding by CD20 mAbs in vivo can promote apoptosis of malignant B cells by CD20 cross-linking. This theory is consistent with experiments showing that effectiveness of CD20 therapy of human lymphoma in a SCID mouse model was dependent upon Fc-receptor binding by the CD20 mAb (Funakoshi et al., J. Immunotherapy 19:93-101 (1996)).

[0022] The CD20 polypeptide contains four transmembrane domains (Einfeld et al., EMBO J. 7: 711-17, (1988); Stamenkovic et al., J. Exp. Med. 167:1975-80 (1988); Tedder et. al., J. Immunol. 141:4388-4394 (1988)). The multiple membrane spanning domains prevent CD20 internalization after antibody binding. This property of CD20 was recognized as an important feature for effective therapy of B cell malignancies when a murine CD20 mAb, 1F5, was injected into patients with B cell lymphoma, resulting in significant depletion of malignant cells and partial clinical responses (Press et al., Blood 69: 584-91 (1987)).

[0023] Because normal mature B cells also express CD20, normal B cells are depleted during CD20 antibody therapy (Reff, M. E. et al, Blood 83: 435-445, 1994). However, after treatment is completed, normal B cells are regenerated from CD20 negative B cell precursors; therefore, patients treated with anti-CD20 therapy do not experience significant immunosuppression. Depletion of normal B cells may also be beneficial in diseases that involve inappropriate production of autoantibodies or other diseases where B cells may play a role. A chimeric mAb specific for CD20, consisting of heavy and light chain variable regions of mouse origin fused to human IgG1 heavy chain and human kappa light chain constant regions, retained binding to CD20 and the ability to mediate ADCC and to fix complement (Liu et al., J. Immunol. 139:3521-26 (1987); Robinson et al., U.S. Pat. No. 5,500,362). This work led to development of a chimeric CD20 mAb, Rituximab™, currently approved by the U.S. Food and Drug Administration for approval for therapy of B cell lymphomas. While clinical responses are frequently observed after treatment with Rituximab™, patients often relapse after about 6-12 months.

[0024] High doses of Rituximab™ are required for intravenous injection because the molecule is large, approximately 150 kDa, and diffusion is limited into the lymphoid tissues where many tumor cells reside. The mechanism of anti-tumor activity of Rituximab™ is thought to be a combination of several activities, including ADCC, complement fixation, and triggering of signals that promote apoptosis in malignant B cells. The large size of Rituximab™ prevents optimal diffusion of the molecule into lymphoid tissues that contain malignant B cells, thereby limiting these anti-tumor activities. As discussed above, cleavage of CD20 mAbs with proteases into Fab or F(ab′)₂ fragments makes them smaller and allows better penetration into lymphoid tissues, but the effector functions important for anti-tumor activity are lost. While CD20 mAb fragments may be more effective than intact antibody for delivery of radioisotopes, it would be desirable to construct a CD20 mAb derivative that retains the effector functions of the Fc portion, but that has a smaller molecular size, facilitating better tumor penetration and resulting in a shorter half-life.

[0025] CD20 is expressed by many malignant cells of B cell origin, including B cell lymphoma and chronic lymphocytic leukemia (CLL). CD20 is not expressed by malignancies of pre-B cells, such as acute lymphoblastic leukemia. CD20 is therefore a good target for therapy of B cell lymphoma, CLL, and other diseases in which B cells are involved in the pathogenesis and/or progression of disease. Other B cell disorders include autoimmune diseases in which autoantibodies are produced during or after the differentiation of B cells into plasma cells. Examples of B cell disorders include autoimmune thyroid disease, including Graves' disease and Hashimoto's thyroiditis, rheumatoid arthritis, systemic lupus erythematosus (SLE), Sjogrens syndrome, immune thrombocytopenic purpura (ITP), multiple sclerosis (MS), myasthenia gravis (MG), psoriasis, scleroderma, and inflammatory bowel disease, including Crohn's disease and ulcerative colitis.

[0026] In view of the foregoing, there is clearly a need for improved compositions and methods to treat malignant conditions in general, and in particular B cell disorders. As described in greater detail herein, the compositions and methods of the present invention overcome the limitations of the prior art by providing a binding domain-immunoglobulin fusion protein that specifically binds to an antigen and that is capable of mediating ADCC or complement fixation. Furthermore, the compositions and methods offer other related advantages.

### SUMMARY OF THE INVENTION

[0027] It is an aspect of the present invention to provide a binding domain-immunoglobulin fusion protein, comprising (a) a binding domain polypeptide that is fused to an immunoglobulin hinge region polypeptide, wherein said hinge region polypeptide is selected from the group consisting of (i) a wild-type human IgG1 immunoglobulin hinge region polypeptide, (ii) a mutated human IgG1 immunoglobulin hinge region polypeptide that is derived from a wild-type immunoglobulin hinge region polypeptide having three or more cysteine residues, wherein said mutated human IgG1 immunoglobulin hinge region polypeptide contains two cysteine residues and wherein a first cysteine of the wild-type hinge region is not mutated, (iii) a mutated human IgG1 immunoglobulin hinge region polypeptide that is derived from a wild-type immunoglobulin hinge region polypeptide having three or more cysteine residues, wherein said mutated human IgG1 immunoglobulin hinge region polypeptide contains no more than one cysteine residue, and (iv) a mutated human IgG1 immunoglobulin hinge region polypeptide that is derived from a wild-type immunoglobulin hinge region polypeptide having three or more cysteine residues, wherein said mutated human IgG1 immunoglobulin hinge region polypeptide contains no cysteine residues; (b) an immunoglobulin heavy chain CH2 constant region polypeptide that is fused to the hinge region polypeptide; and (c) an immunoglobulin heavy chain CH3 constant region polypeptide that is fused to the CH2 constant region polypeptide, wherein (1) the binding domain-immunoglobulin fusion protein is capable of at least one immunological activity selected from the group consisting of antibody dependent cell-mediated cytotoxicity and complement fixation, and (2) the binding domain polypeptide is capable of specifically binding to an antigen.

[0028] In certain embodiments the immunoglobulin hinge region polypeptide is a mutated hinge region polypeptide and exhibits a reduced ability to dimerize, relative to a wild-type human immunoglobulin G hinge region polypeptide. In certain embodiments the binding domain polypeptide comprises at least one immunoglobulin variable region polypeptide that is selected an immunoglobulin light chain variable region polypeptide or an immunoglobulin heavy chain variable region polypeptide. In certain further embodiments the binding domain-immunoglobulin fusion protein comprises an immunoglobulin heavy chain variable region polypeptide, wherein the heavy chain variable region polypeptide is a human immunoglobulin heavy chain variable region polypeptide comprising a mutation at an amino acid at a location corresponding to amino acid position 11 in SEQ ID NO:______. In certain other further embodiments the fusion protein comprises a polypeptide having a sequence selected from SEQ ID NOS:______ or SEQ ID NO:______. In certain embodiments the immunoglobulin variable region polypeptide is derived from a human immunoglobulin, and in certain other embodiments the immunoglobulin variable region polypeptide comprises a humanized immunoglobulin polypeptide sequence. In certain embodiments the immunoglobulin variable region polypeptide is derived from a murine immunoglobulin.

[0029] According to certain embodiments of the present inventin, the binding domain polypeptide comprises (a) at least one immunoglobulin light chain variable region polypeptide; (b) at least one immunoglobulin heavy chain variable region polypeptide; and (c) at least one linker polypeptide that is fused to the polypeptide of (a) and to the polypeptide of (b). In certain further embodiments the immunoglobulin light chain variable region and heavy chain variable region polypeptides are derived from human immunoglobulins, and in certain other further embodiments the linker polypeptide comprises at least one polypeptide having as an amino acid sequence Gly-Gly-Gly-Gly-Ser [SEQ ID NO:______]. In other embodiments the linker polypeptide comprises at least three repeats of a polypeptide having as an amino acid sequence Gly-Gly-Gly-Gly-Ser [SEQ ID NO:_______]. In other embodiments the linker comprises a glycosylation site, which in certain further embodiments is an asparagine-linked glycosylation site, an O-linked glycosylation site, a C-mannosylation site, a glypiation site or a phosphoglycation site. In another embodiment at least one of the immunoglobulin heavy chain CH2 constant region polypeptide and the immunoglobulin heavy chain CH3 constant region polypeptide is derived from a human immunoglobulin heavy chain. In another embodiment the immunoglobulin heavy chain constant region CH2 and CH3 polypeptides are of an isotype that is human IgG or human IgA. In certain other embodiments the antigen is CD19, CD20, CD22, CD37, CD40, L6, CD2, CD28, CD30, CD40, CD50 (ICAM3), CD54 (ICAM1), CD80, CD86, B7-H1, CD134 (OX40), CD137 (41BB), CD152 (CTLA-4), CD153 (CD30 ligand), CD154 (CD40 ligand), ICOS, CD19, CD3, CD4, CD25, CD8, CD11b, CD14, CD25, CD56 or CD69. In another embodiment the binding domain polypeptide comprises a CD154 extracellular domain. In still another embodiment the binding domain polypeptide comprises a CD154 extracellular domain and at least one immunoglobulin variable region polypeptide. In another embodiment the binding domain polypeptide comprises a CTLA-4 extracellular domain, and in further embodiments at least one of the immunoglobulin heavy chain constant region polypeptides selected from a CH2 constant region polypeptide and a CH3 constant region polypeptide is a human IgG1 constant region polypeptide. In another further embodiment at least one of the immunoglobulin heavy chain constant region polypeptides selected from a CH2 constant region polypeptide and a CH3 constant region polypeptide is a human IgA constant region polypeptide.

[0030] Turning to another embodiment, the present invention provides a binding domain-immunoglobulin fusion protein, comprising (a) a binding domain polypeptide that is fused to an immunoglobulin hinge region polypeptide; (b) an immunoglobulin heavy chain CH2 constant region polypeptide that is fused to the hinge region polypeptide; and (c) an immunoglobulin heavy chain CH3 constant region polypeptide that is fused to the CH2 constant region polypeptide, wherein (1) the binding domain polypeptide comprises a CTLA-4 extracellular domain that is capable of specifically binding to at least one CTLA-4 ligand selected from the group consisting of CD80 and CD86, (2) the immunoglobulin hinge region polypeptide comprises a polypeptide that is selected from the group consisting of a human IgA hinge region polypeptide and a human IgG1 hinge region polypeptide, (3) the immunoglobulin heavy chain CH2 constant region polypeptide comprises a polypeptide that is selected from the group consisting of a human IgA heavy chain CH2 constant region polypeptide and a human IgG1 heavy chain CH2 constant region polypeptide, (4) the immunoglobulin heavy chain CH3 constant region polypeptide comprises a polypeptide that is selected from the group consisting of a human IgA heavy chain CH3 constant region polypeptide and a human IgG1 heavy chain CH3 constant region polypeptide, and (5) the binding domain-immunoglobulin fusion protein is capable of at least one immunological activity selected from the group consisting of antibody dependent cell-mediated cytotoxicity and complement fixation.

[0031] In another embodiment the present invention provides a binding domain-immunoglobulin fusion protein, comprising (a) a binding domain polypeptide that is fused to an immunoglobulin hinge region polypeptide, wherein said hinge region polypeptide comprises a human IgE hinge region polypeptide; (b) an immunoglobulin heavy chain CH2 constant region polypeptide that is fused to the hinge region polypeptide, wherein said CH2 constant region polypeptide comprises a human IgE CH2 constant region polypeptide; and (c) an immunoglobulin heavy chain CH3 constant region polypeptide that is fused to the CH2 constant region polypeptide, wherein said CH3 constant region polypeptide comprises a human IgE CH3 constant region polypeptide wherein (1) the binding domain-immunoglobulin fusion protein is capable of at least one immunological activity selected from antibody dependent cell-mediated cytotoxicity and induction of an allergic response mechanism, and (2) the binding domain polypeptide is capable of specifically binding to an antigen. In a further embodiment the binding domain-immunoglobulin fusion protein comprises a human IgE CH4 constant region polypeptide. In another further embodiment the antigen is a tumor antigen.

[0032] In certain other embodiments the present invention provides a binding domain-immunoglobulin fusion protein, comprising (a) a binding domain polypeptide that is fused to an immunoglobulin hinge region polypeptide, wherein the binding domain polypeptide is capable of specifically binding to at least one antigen that is present on an immune effector cell and wherein the hinge region polypeptide comprises a polypeptide selected from the group consisting of a human IgA hinge region polypeptide, a human IgG hinge region polypeptide, and a human IgE hinge region polypeptide; (b) an immunoglobulin heavy chain CH2 constant region polypeptide that is fused to the hinge region polypeptide, wherein said CH2 constant region polypeptide comprises a polypeptide selected from the group consisting of a human IgA CH2 constant region polypeptide, a human IgG CH2 constant region polypeptide, and a human IgE CH2 constant region polypeptide; (c) an immunoglobulin heavy chain CH3 constant region polypeptide that is fused to the CH2 constant region polypeptide, wherein said CH3 constant region polypeptide comprises a polypeptide selected from the group consisting of a human IgA CH3 constant region polypeptide, a human IgG CH3 constant region polypeptide, and a human IgE CH3 constant region polypeptide; and (d) a plasma membrane anchor domain polypeptide. In a further embodiment the membrane anchor domain polypeptide comprises a transmembrane domain polypeptide. In another further embodiment the membrane anchor domain polypeptide comprises a transmembrane domain polypeptide and a cytoplasmic tail polypeptide. In a still further embodiment the cytoplasmic tail polypeptide comprises an apoptosis signaling polypeptide sequence, which in a still further embodiment is derived from a receptor death domain polypeptide. In a further embodiment the death domain polypeptide comprises a polypeptide selected from an ITIM domain, an ITAM domain, FADD, TRADD, RAIDD, CD95 (FAS/Apo-1), TNFR1 or DR5. In another embodiment the apoptosis signaling polypeptide sequence comprises a polypeptide sequence derived from a caspase polypeptide that is caspase-3 or caspase-8. In another embodiment the plasma membrane anchor domain polypeptide comprises a glycosyl-phosphatidylinositol-linkage polypeptide sequence. In another embodiment the antigen that is present on an immune effector cell is CD2, CD28, CD30, CD40, CD50 (ICAM3), CD54 (ICAM1), CD80, CD86, B7-H1, CD134 (OX40), CD137 (41BB), CD152 (CTLA-4), CD153 (CD30 ligand), CD154 (CD40 ligand), ICOS, CD19, CD20, CD22, CD37, L6, CD3, CD4, CD25, CD8, CD11b, CD14, CD25, CD56 or CD69. In another embodiment the human IgG is human IgG1.

[0033] The invention provides, in another embodiment, a binding domain-immunoglobulin fusion protein, comprising (a) a binding domain polypeptide that is fused to an immunoglobulin hinge region polypeptide, wherein the binding domain polypeptide is capable of specifically binding to at least one antigen that is present on a cancer cell surface and wherein the hinge region polypeptide comprises a polypeptide selected from the group consisting of a human IgA hinge region polypeptide, a human IgG hinge region polypeptide, and a human IgE hinge region polypeptide; (b) an immunoglobulin heavy chain CH2 constant region polypeptide that is fused to the hinge region polypeptide, wherein the CH2 constant region polypeptide comprises a polypeptide that is a human IgA CH2 constant region polypeptide, a human IgG CH2 constant region polypeptide, or a human IgE CH2 constant region polypeptide; (c) an immunoglobulin heavy chain CH3 constant region polypeptide that is fused to the CH2 constant region polypeptide, wherein the CH3 constant region polypeptide comprises a polypeptide that is a human IgA CH3 constant region polypeptide, a human IgG CH3 constant region polypeptide, or a human IgE CH3 constant region polypeptide; and (d) a plasma membrane anchor domain polypeptide. In a further embodiment the membrane anchor domain polypeptide comprises a transmembrane domain polypeptide. In another embodiment the membrane anchor domain polypeptide comprises a transmembrane domain polypeptide and a cytoplasmic tail polypeptide. In another embodiment the membrane anchor domain polypeptide comprises a glycosyl-phosphatidylinositol-linkage polypeptide sequence. In another embodiment the human IgG is human IgG1.

[0034] In another embodiment the present invention provides a binding domain-immunoglobulin fusion protein, comprising (a) a binding domain polypeptide that is fused to an immunoglobulin hinge region polypeptide, wherein said hinge region polypeptide comprises a wild-type human IgA hinge region polypeptide; (b) an immunoglobulin heavy chain CH2 constant region polypeptide that is fused to the hinge region polypeptide, wherein said CH2 constant region polypeptide comprises a human IgA CH2 constant region polypeptide; and (c) an immunoglobulin heavy chain CH3 constant region polypeptide that is fused to the CH2 constant region polypeptide, wherein the CH3 constant region polypeptide comprises a polypeptide that is (i) a wild-type human IgA CH3 constant region polypeptide or (ii) a mutated human IgA CH3 constant region polypeptide that is incapable of associating with a J chain, wherein (1) the binding domain-immunoglobulin fusion protein is capable of at least one immunological activity selected from the group consisting of antibody dependent cell-mediated cytotoxicity and complement fixation, and (2) the binding domain polypeptide is capable of specifically binding to an antigen. In certain further embodiments the mutated human IgA CH3 constant region polypeptide that is incapable of associating with a J chain is (i) a polypeptide comprising an amino acid sequence as set forth in SEQ ID NO:______ or (ii) a polypeptide comprising an amino acid sequence as set forth in SEQ ID NO:______.

[0035] In certain other embodiments the present invention provides a binding domain-immunoglobulin fusion protein, comprising (a) a binding domain polypeptide that is fused to an immunoglobulin hinge region polypeptide; (b) an immunoglobulin heavy chain CH2 constant region polypeptide that is fused to the hinge region polypeptide, wherein the CH2 constant region polypeptide comprises a llama CH2 constant region polypeptide that is a llama IgG1 CH2 constant region polypeptide, a llama IgG2 CH2 constant region polypeptide or a llama IgG3 CH2 constant region polypeptide; and (c) an immunoglobulin heavy chain CH3 constant region polypeptide that is fused to the CH2 constant region polypeptide, wherein said CH3 constant region polypeptide comprises a llama CH3 constant region polypeptide that is selected from the group consisting of a llama IgG1 CH3 constant region polypeptide, a llama IgG2 CH3 constant region polypeptide and a llama IgG3 CH3 constant region polypeptide wherein (1) the binding domain-immunoglobulin fusion protein is capable of at least one immunological activity selected from the group consisting of antibody dependent cell-mediated cytotoxicity and induction fixation of complement, and (2) the binding domain polypeptide is capable of specifically binding to an antigen. In a further embodiment the immunoglobulin hinge region polypeptide, the llama CH2 constant region polypeptide and the llama CH3 constant region polypeptide comprise sequences derived from a llama IgG1 polypeptide and the fusion protein does not include a llama IgG1 CH1 domain. In certain embodiments the invention provides any of the above described binding domain-immunoglobulin fusion proteins wherein the hinge region polypeptide is mutated to contain a glycosylation site, which in certain further embodiments is an asparagine-linked glycosylation site, an O-linked glycosylation site, a C-mannosylation site, a glypiation site or a phosphoglycation site. In certain embodiments the invention provides any of the above described binding domain-immunoglobulin fusion proteins wherein the binding domain polypeptide comprises two or more binding domain polypeptide sequences wherein each of the binding domain polypeptide sequences is capable of specifically binding to an antigen.

[0036] The present invention also provides, in certain embodiments, a binding domain-immunoglubulin fusion protein, comprising (a) a binding domain polypeptide that is fused to an immunoglobulin hinge region polypeptide, wherein the hinge region polypeptide comprises an alternative hinge region polypeptide sequence; (b) an immunoglobulin heavy chain CH2 constant region polypeptide that is fused to the hinge region polypeptide; and (c) an immunoglobulin heavy chain CH3 constant region polypeptide that is fused to the CH2 constant region polypeptide, wherein: (1) the binding domain-immunoglobulin fusion protein is capable of at least one immunological activity selected from the group consisting of antibody dependent cell-mediated cytotoxicity and complement fixation, and (2) the binding domain polypeptide is capable of specifically binding to an antigen.

[0037] Turning to another embodiment there is provided a binding domain-immunoglobulin fusion protein, comprising (a) a binding domain polypeptide that is fused to an immunoglobulin hinge region polypeptide, wherein the binding domain polypeptide is capable of specifically binding to at least one antigen that is present on a cancer cell surface and wherein the hinge region polypeptide comprises an alternative hinge region polypeptide sequence; (b) an immunoglobulin heavy chain CH2 constant region polypeptide that is fused to the hinge region polypeptide, wherein said CH2 constant region polypeptide comprises a polypeptide selected from the group consisting of a human IgA CH2 constant region polypeptide, a human IgG CH2 constant region polypeptide, and a human IgE CH2 constant region polypeptide; (c) an immunoglobulin heavy chain CH3 constant region polypeptide that is fused to the CH2 constant region polypeptide, wherein the CH3 constant region polypeptide comprises a polypeptide that is a human IgA CH3 constant region polypeptide, a human IgG CH3 constant region polypeptide, or a human IgE CH3 constant region polypeptide; and (d) a plasma membrane anchor domain polypeptide. In certain further embodiments the alternative hinge region polypeptide sequence comprises a polypeptide sequence of at least ten continuous amino acids that are present in a sequence selected from SEQ ID NOS:___-___.

[0038] In certain embodiments the present invention provides an isolated polynucleotide encoding any one of the above described binding domain-immunoglobulin fusion proteins, and in other embodiments the invention provides a recombinant expression construct comprising any such polynucleotide that is operably linked to a promoter. In other embodiments there is provided a host cell transformed or transfected with any such recombinant expression construct. In a related embodiment there is provided a method of producing a binding domain-immunoglobulin fusion protein, comprising the steps of (a) culturing a host cell as just described under conditions that permit expression of the binding domain-immunoglobulin fusion protein; and (b) isolating the binding domain-immunoglobulin fusion protein from the host cell culture. In another embodiment there is provided a pharmaceutical composition comprising any one of the above described binding domain-immunoglobulin fusion proteins in combination with a physiologically acceptable carrier. In another embodiment the invention provides a pharmaceutical composition comprising an isolated polynucleotide encoding any one of the above described binding domain-immunoglobulin fusion proteins, in combination with a physiologically acceptable carrier. In another embodiment the invention provides a method of treating a subject having or suspected of having a malignant condition or a B-cell disorder, comprising administering to a patient a therapeutically effective amount of any of the pharmaceutical compositions just described. In certain further embodiments the malignant condition or B-cell disorder is a B-cell lymphoma or a disease characterized by autoantibody production, and in certain other further embodiments the malignant condition or B-cell disorder is rheumatoid arthritis, myasthenia gravis, Grave's disease, type I diabetes mellitus, multiple sclerosis or an autoimmune disease. In certain other embodiments the malignant condition is melanoma, carcinoma or sarcoma.

[0039] It is another aspect of the present invention to provide a binding domain-immunoglobulin fusion protein, comprising (a) a binding domain polypeptide that is fused to an immunoglobulin hinge region polypeptide, wherein said hinge region polypeptide is selected from the group consisting of (i) a mutated hinge region polypeptide that contains no cysteine residues and that is derived from a wild-type immunoglobulin hinge region polypeptide having one or more cysteine residues, (ii) a mutated hinge region polypeptide that contains one cysteine residue and that is derived from a wild-type immunoglobulin hinge region polypeptide having two or more cysteine residues, (iii) a wild-type human IgA hinge region polypeptide, (iv) a mutated human IgA hinge region polypeptide that contains no cysteine residues and that is derived from a wild-type human IgA region polypeptide, and (v) a mutated human IgA hinge region polypeptide that contains one cysteine residue and that is derived from a wild-type human IgA region polypeptide; (b) an immunoglobulin heavy chain CH2 constant region polypeptide that is fused to the hinge region polypeptide; and (c) an immunoglobulin heavy chain CH3 constant region polypeptide that is fused to the CH2 constant region polypeptide, wherein: (1) the binding domain-immunoglobulin fusion protein is capable of at least one immunological activity selected from the group consisting of antibody dependent cell-mediated cytotoxicity and complement fixation, and (2) the binding domain polypeptide is capable of specifically binding to an antigen. In one embodiment the immunoglobulin hinge region polypeptide is a mutated hinge region polypeptide and exhibits a reduced ability to dimerize, relative to a wild-type human immunoglobulin G hinge region polypeptide. In another embodiment the binding domain polypeptide comprises at least one immunoglobulin variable region polypeptide that is an immunoglobulin light chain variable region polypeptide or an immunoglobulin heavy chain variable region polypeptide. In a further embodiment the immunoglobulin variable region polypeptide is derived from a human immunoglobulin.

[0040] In another embodiment the binding domain Fv-immunoglobulin fusion protein binding domain polypeptide comprises (a) at least one immunoglobulin light chain variable region polypeptide; (b) at least one immunoglobulin heavy chain variable region polypeptide; and (c) at least one linker peptide that is fused to the polypeptide of (a) and to the polypeptide of (b). In a further embodiment the immunoglobulin light chain variable region and heavy chain variable region polypeptides are derived from human immunoglobulins.

[0041] In another embodiment at least one of the immunoglobulin heavy chain CH2 constant region polypeptide and the immunoglobulin heavy chain CH3 constant region polypeptide is derived from a human immunoglobulin heavy chain. In another embodiment the immunoglobulin heavy chain constant region CH2 and CH3 polypeptides are of an isotype selected from human IgG and human IgA. In another embodiment the antigen is selected from the group consisting of CD19, CD20, CD37, CD40 and L6. In certain further embodiments of the above described fusion protein, the linker polypeptide comprises at least one polypeptide having as an amino acid sequence Gly-Gly-Gly-Gly-Ser [SEQ ID NO:______], and in certain other embodiments the linker polypeptide comprises at least three repeats of a polypeptide having as an amino acid sequence Gly-Gly-Gly-Gly-Ser [SEQ ID NO:______]. In certain embodiments the immunoglobulin hinge region polypeptide comprises a human IgA hinge region polypeptide. In certain embodiments the binding domain polypeptide comprises a CD154 extracellular domain. In certain embodiments the binding domain polypeptide comprises a CD154 extracellular domain and at least one immunoglobulin variable region polypeptide.

[0042] In other embodiments the invention provides an isolated polynucleotide encoding any of the above described binding domain-immunoglobulin fusion proteins, and in related embodiments the invention provides a recombinant expression construct comprising such a polynucleotide, and in certain further embodiments the invention provides a host cell transformed or transfected with suc a recombinant expression construct. In another embodiment the invention provides a method of producing a binding domain-immunoglobulin fusion protein, comprising the steps of (a) culturing the host cell as just described, under conditions that permit expression of the binding domain-immunoglobulin fusion protein; and (b) isolating the binding domain-immunoglobulin fusion protein from the host cell culture.

[0043] The present invention also provides in certain embodiments a pharmaceutical composition comprising a binding domain-immunoglobulin fusion protein as described above, in combination with a physiologically acceptable carrier. In another embodiment there is provided a method of treating a subject having or suspected of having a malignant condition or a B-cell disorder, comprising administering to a patient a therapeutically effective amount of an above described binding domain-immunoglobulin fusion protein. In certain further embodiments the malignant condition or B-cell disorder is a B-cell lymphoma or a disease characterized by autoantibody production, and in certain other further embodiments the malignant condition or B-cell disorder is rheumatoid arthritis, myasthenia gravis, Grave's disease, type I diabetes mellitus, multiple sclerosis or an autoimmune disease.

[0044] These and other aspects of the present invention will become apparent upon reference to the following detailed description and attached drawings. All references disclosed herein are hereby incorporated by reference in their entireties as if each was incorporated individually.

### BRIEF DESCRIPTION OF THE DRAWINGS

[0045] FIG. 1 shows DNA and deduced amino acid sequences [SEQ ID NOS:______] of 2H7scFv-Ig, a binding domain-immunoglobulin fusion protein capable of specifically binding CD20.

[0046] FIG. 2 shows production levels of 2H7 scFv-Ig by transfected, stable CHO lines and generation of a standard curve by binding of purified 2H7 scFv-Ig to CHO cells expressing CD20.

[0047] FIG. 3 shows SDS-PAGE analysis of multiple preparations of isolated 2H7scFv-Ig protein.

[0048] FIG. 4 shows complement fixation (FIG. 4A) and mediation of antibody-dependent cellular cytotoxicity (ADCC, FIG. 4B)) by 2H7scFv-Ig.

[0049] FIG. 5 shows the effect of simultaneous ligation of CD20 and CD40 on growth of normal B cells.

[0050] FIG. 6 shows the effect of simultaneous ligation of CD20 and CD40 on CD95 expression and induction of apoptosis in a B lymphoblastoid cell line.

[0051] FIG. 7 shows DNA and deduced amino acid sequences [SEQ ID NOS:______] of 2H7scFv-CD154 L2 (FIG. 7A, SEQ ID NOS:______) and 2H7scFv-CD154 S4 (FIG. 7B, SEQ ID NOS:______) binding domain-immunoglobulin fusion proteins capable of specifically binding CD20 and CD40.

[0052] FIG. 8 shows binding of 2H7scFv-CD154 binding domain-immunoglobulin fusion proteins to CD20+ CHO cells by flow immunocytofluorimetry.

[0053] FIG. 9 shows binding of Annexin V to B cell lines Ramos, BJAB, and T51 after binding of 2H7scFv-CD154 binding domain-immunoglobulin fusion protein to cells.

[0054] FIG. 10 shows effects on proliferation of B cell line T51 following binding of 2H7scFv-CD154 binding domain-immunoglobulin fusion protein.

[0055] FIG. 11 depicts schematic representations of the structures of 2H7ScFv-Ig fusion proteins [SEQ ID NOS:______] referred to as CytoxB or CytoxB derivatives: CytoxB-MHWTG1C (2H7 ScFv, mutant hinge, wild-type human IgG1 Fc domain), CytoxB-MHMG1C (2H7 ScFv, mutant hinge, mutated human IgG1 Fc domain) and CytoxB-IgAHWTHG1C (2H7 ScFv, human IgA-derived hinge [SEQ ID NO:______], wild-type human IgG1 Fc domain). Arrows indicate position numbers of amino acid residues believed to contribute to FcR binding and ADCC activity (heavy arrows), and to complement fixation (light arrows). Note absence of interchain disulfide bonds.

[0056] FIG. 12 shows SDS-PAGE analysis of isolated CytoxB and 2H7scFv-CD154 binding domain-immunoglobulin fusion proteins.

[0057] FIG. 13 shows antibody dependent cell-mediated cytotoxicity (ADCC) activity of CytoxB derivatives.

[0058] FIG. 14 shows complement dependent cytotoxicity (CDC) of CytoxB derivatives.

[0059] FIG. 15 shows serum half-life determinations of CytoxB-MHWTG1C in macaque blood samples.

[0060] FIG. 16 shows effects of CytoxB-MHWTG1C on levels of circulating CD40+ B cells in macaque blood samples.

[0061] FIG. 17 shows production levels of HD37 (CD19-specific) ScFv-Ig by transfected mammalian cell lines and generation of a standard curve by binding of purified HD37 ScFv-Ig to cells expressing CD19.

[0062] FIG. 18 shows production levels of L6 (carcinoma antigen) ScFv-Ig by transfected, stable CHO lines and generation of a standard curve by binding of purified L6 ScFv-Ig to cells expressing L6 antigen.

[0063] FIG. 19 shows ADCC activity of binding domain-immunoglobulin fusion proteins 2H7 ScFv-Ig, HD37 ScFv-Ig and G28-1 (CD37-specific) ScFv-Ig.

[0064] FIG. 20 shows ADCC activity of L6 ScFv-Ig fusion proteins.

[0065] FIG. 21 shows SDS-PAGE analysis of L6 ScFv-Ig and 2H7 ScFv-Ig fusion proteins.

[0066] FIG. 22 shows SDS-PAGE analysis of G28-1 ScFv-Ig and HD37 ScFv-Ig fusion proteins.

[0067] FIG. 23 presents a sequence alignment of immunoglobulin hinge and CH2 domains of human IgG1 (SEQ ID NO:______) with the hinge and CH2 domains of llama IgG1 (SEQ ID NO:______, IgG2 (SEQ ID NO:______), and IgG3 (SEQ ID NO:______).

[0068] FIG. 24 illustrates migration of purified 2H7 scFv llama IgG fusion proteins in a 10% SDS polyacrylamide gel. Purified fusion proteins (5 μg per sample) were prepared in non-reducing sample buffer (lanes 2-5) and in reducing sample buffer (lanes 6-9). Lane 1: molecular weight markers (non-reduced); lanes 2 and 6: 2H7 scFv-llama IgG1 (SEQ ID NO:______); Lanes 3 and 7: 2H7 scFv-llama IgG2 (SEQ ID NO:______): lanes 4 and 8: 2H7 scFv-llama IgG3 (SEQ ID NO:______); and Lanes 5 and 9: Rituximab (chimeric anti-CD20 antibody (human IgG1 constant region)).

[0069] FIG. 25 shows binding of 2H7 scFv-llama IgG1 (SEQ ID NO:_______), 2H7 scFv-llama IgG2 (SEQ ID NO:______), and 2H7 scFv-llama IgG3 (SEQ ID NO:______) to CD20+ CHO cells detected by flow immunocytofluorimetry.

[0070] FIG. 26 depicts CDC activity of 2H7 scFv llama IgG fusion proteins, 2H7 scFv-llama IgG1 (SEQ ID NO:______), 2H7 scFv-llama IgG2 (SEQ ID NO:______), and 2H7 scFv-llama IgG3 (SEQ ID NO:______), and 2H7 scFv human IgG1 (2H7 scFv IgG WTH WTCH2CH3) (SEQ ID NO:______) against BJAB cells in the presence of rabbit complement. Rituximab was included as a positive control.

[0071] FIG. 27 shows ADCC activity of 2H7 scFv llama IgG fusion proteins, 2H7 scFv-llama IgG1 (SEQ ID NO:______), 2H7 scFv-llama IgG2 (SEQ ID NO:______), and 2H7 scFv-llama IgG3 (SEQ ID NO:_______). Effector cells (human PBMC) were combined with target cells (BJAB cells) at three different ratios, 1:25, 1:50, and 1:100. Rituximab was included as a positive control. Each data point represents three separate measurements.

[0072] FIG. 28 shows ADCC activity of 2H7 scFv llama IgG fusion proteins, 2H7 scFv-llama IgG1 (SEQ ID NO:______), 2H7 scFv-llama IgG2 (SEQ ID NO:______), and 2H7 scFv-llama IgG3 (SEQ ID NO:______). Effector cells (llama PBMC) were combined with target cells (BJAB cells) at three different ratios, 1:25, 1:50, and 1:100. Rituximab was included as a positive control. Each data point represents three separate measurements.

[0073] FIG. 29 depicts CDC activity of Reh cells (acute lymphocytic leukemia) expressing scFv-Ig fusion proteins on the cell surface. Reh cells were transfected with constructs encoding scFv antibodies specific for human costimulatory molecules, CD152, CD28, CD40, and CD20, fused to human IgG1 wild-type hinge-CH2-CH3, which was fused to human CD80 transmembrane and cytoplasmic tail domains. CDC activity was measured in the presence and absence of rabbit complement (plus C′ and no C′, respectively). The data represent the average of duplicate samples. Reh anti-hCD152 scFvIg: Reh cells transfected with polynucleotide 10A8 scFv IgG MTH (SSS) MT CH2CH3 (SEQ ID NO:______); Reh anti-hCD28scFvIg: 2E12 scFv IgG MTH (SSS) MT CH2CH3 (SEQ ID NO:______); Reh anti-hCD40scFvIg: 4.2.220 scFv IgG MTH (SSS) MT CH2CH3 (SEQ ID NO:______); and Reh anti-hCD20scFvIg: 2H7 scFv IgG MTH (SSS) MT CH2CH3 (SEQ ID NO:______).

[0074] FIG. 30 presents ADCC activity of Reh cells that were transfected with constructs encoding scFv antibodies specific for human costimulatory molecules, CD152, CD28, CD40, and CD20, as described for FIG. 29, and for murine CD3, fused to human mutant IgG1 hinge and mutant CH2 and wild type CH3 (Reh anti-mCD3scFv designating Reh cells transfected with polynucleotide 500A2 scFv IgG MTH (SSS) MTCH2WTCH3 SEQ ID NO:______), which was fused to human CD80 transmembrane and cytoplasmic tail domains. The data represent the average of quadruplicate samples.

[0075] FIG. 31 lists immunoglobulin constant region constructs that were used in experiments illustrated in subsequent figures.

[0076] FIG. 32 depicts CDC activity of CTLA-4 Ig fusion proteins, CTLA-4 IgG WTH (CCC) WTCH2CH3 (SEQ ID NO:______) (2 μg/ml) and CTLA-4 IgG MTH MTCH2WTCH3 (SEQ ID NO:_______) (2 μg/ml), in the presence and absence of rabbit complement (plus C′ and no C′, respectively). The target cells were Reh cells and Reh cells transfected with CD80 (Reh CD80.10).

[0077] FIG. 33 shows ADCC activity of CTLA-4 Ig fusion proteins, CTLA-4 IgG WTH (CCC) WTCH2CH3 (SEQ ID NO:______) (2 μg/ml) and CTLA-4 IgG MTH MTCH2WTCH3 (SEQ ID NO:______) (2 μg/ml). Effector cells, human PBMC, were added to target cells, Reh or Reh CD80.1, at the ratios indicated. FIG. 33A presents the level of natural killing in Reh CD80.1 cells in the absence of any Ig fusion protein. FIG. 33B presents ADCC mediated by CTLA-4 IgG MTH MTCH2WTCH3, and FIG. 33C presents ADCC mediated by CTLA-4 IgG WTH (CCC) WTCH2CH3. Each data point represents the average percent specific killing measured in four sample wells.

[0078] FIG. 34 illustrates binding of 2H7 (anti-CD20) scFv Ig fusion proteins to (CD20+) CHO cells by flow immunocytofluorimetry.

[0079] FIG. 35 presents an immunoblot of 2H7 scFv IgG and IgA fusion proteins. COS cells were transiently transfected with various 2H7 scFv Ig fusion protein constructs. The expressed polypeptides were immune precipitated with protein A, separated in a non-reducing SDS polyacrylamide gel, and then transferred to a polyvinyl fluoride membrane. Proteins were detected using an anti-human IgG (Fc specific) horseradish peroxidase conjugate. Lane 1: vector only; lane 2: 2H7 scFv IgG WTH (CCC) WTCH2CH3 (SEQ ID NO:______); lane 3: 2H7 scFv IgG MTH (CSS) WTCH2CH3 (SEQ ID NO:______); lane 4: 2H7 scFv IgG MTH (SCS) WTCH2CH3 (SEQ ID NO:______); lane 5: 2H7 scFv IgAH IgG WTCH2CH3 (SEQ ID NO:______); and lane 6: 2H7 scFv IgG MTH (SSS) WTCH2CH3 (SEQ ID NO:______).

[0080] FIG. 36 illustrates binding of 2H7 scFv IgAH IgACH2CH3 polypeptide (SEQ ID NO:______) and 2H7 scFv IgAH IgAT4 (SEQ ID NO:______) to (CD20+) CHO cells by flow immunocytofluorimetry. The source of the polypeptides was culture supernatants from transiently transfected COS cells. COS cells transfected with a plasmid comprising a sequence encoding 2H7 scFv IgAH IgACH2CH3 were co-transfected with a plasmid containing nucleotide sequence encoding human J chain.

[0081] FIG. 37 illustrates ADCC activity of anti-CD20 (2H7) scFv Ig fusion proteins against BJAB target cells using whole blood as the source of effector cells. Purified 2H7 scFv Ig fusion proteins were titrated and combined with ⁵¹Cr-labeled BJAB cells (5×10⁴) and whole blood (1:4 final dilution). Each data point represents the average percent specific killing measured in four sample wells.

[0082] FIG. 38 demonstrates ADCC activity of 2H7 scFv Ig fusion proteins (5 μg/ml) against ⁵¹Cr-labeled BJAB cells at 0.25, 0.125, and 0.625 dilutions of whole blood. Each data point represents the average percent specific killing measured in four sample wells.

[0083] FIG. 39 shows a comparison of ADCC activity of 2H7 scFv IgG MTH (SSS) WTCH2CH3 (5 μg/ml) and 2H7 scFv IgAH IgACH2CH3 (5 μg/ml) when human PBMC are the source of effector cells (FIG. 39A) and when human whole blood is the source of effector cells (FIG. 39B).

[0084] FIG. 40 presents an immunoblot of 2H7 scFv IgG fusion proteins. COS cells were transiently transfected with various 2H7 scFv Ig fusion protein constructs. Culture supernatants containing the expressed polypeptides were separated in a non-reducing SDS polyacrylamide gel, and then were transferred to a polyvinyl fluoride membrane. Proteins were detected using an anti-human IgG (Fc specific) horseradish peroxidase conjugate. Lanes 1-5: purified 2H7 scFv IgG MTH (SSS) WTCH2CH3 at 40 ng, 20 ng, 10 ng/ 5 ng, and 2.5 ng per lane, respectively. Culture supernatants were separated in lanes 6-9. Lane 6: 2H7 scFv IgG WTH (CCC) WTCH2CH3; lane 7: 2H7 scFv IgG MTH (CSS) WTCH2CH3; lane 8: 2H7 scFv IgG MTH (SCS) WTCH2CH3; and lane 9: 2H7 scFv VHSER11 IgG MTH (SSS) WTCH2CH3. The molecular weight (kDal) of marker proteins is indicated on the left side of the immunoblot.

[0085] FIG. 41A illustrates cell surface expression of 1D8 (anti-murine 4-1BB) scFv IgG WTH WTCH2CH3-CD80 fusion protein on K1735 melanoma cells by flow immunofluorimetry. The scFv fusion protein was detected with phycoerythrin-conjugated F(ab′)₂ goat anti-human IgG. FIG. 41B depicts growth of tumors in naïve C3H mice transplanted by subcutaneous injection with wild type K1735 melanoma cells (K1735-WT) or with K1735 cells transfected with 1D8 scFv IgG WTH WTCH2CH3-CD80 (K1735-1D8). Tumor growth was monitored by measuring the size of the tumor. FIG. 41C demonstrates the kinetics of tumor growth in naive C3H mice injected intraperitoneally with monoclonal antibodies to remove CD8⁺, CD4⁺, or both CD4⁺ and CD8⁺ T cells prior to transplantation of the animals with K1735-1D8 cells.

[0086] FIG. 42 demonstrates therapy of established K1735-WT tumors using K1735-1D8 as an immunogen. Six days after mice were transplanted with K1735-WT tumors, one group (five animals) was injected subcutaneously with K1735-1D8 cells (open circles) or irradiated K1735-WT cells (solid squares) on the contralateral side. A control group of mice received PBS (open squares). Treatments were repeated on the days indicated by the arrows.

[0087] FIG. 43 shows the growth of tumors in animals that were injected subcutaneously with 2×10⁶ K1735-WT cells (solid squares) and the growth of tumors in animals that were injected subcutaneously with 2×10⁶ K1735-WT cells plus 2×10⁵ K1735-1D8 cells (open triangles).

[0088] FIG. 44 presents a flow cytometry analysis of Ag104 murine sarcoma tumor cells transfected with 1D8 scFv IgG WTH WTCH2CH3-CD80 isolated after repeated rounds of panning against anti-human IgG. Transfected cells expressing 1D8 scFv IgG WTH WTCH2CH3-CD80 were detected with fluoroisothiocyanate (FITC)-conjugated goat anti-human IgG (depicted in black). Untransfected cells are shown in gray.

[0089] FIG. 45 illustrates migration of various 2H7 scFv Ig fusion proteins in a 10% SDS-PAGE gel. 2H7 was the anti-CD20 scFv and [220] was the anti-CD40 scFv. Lane 1: Bio-Rad prestained molecular weight standards; lane 2: anti-CD20 scFv IgG MTH (SSS) MTCH2WTCH3; lane 3: anti-CD20 scFv IgG MTH (SSS) WTCH2CH3; lane 4: 2H7 scFv IgAH IgG WTCH2CH3; lane 5: anti-CD20-anti-CD40 scFv IgG MTH (SSS) MTCH2WTCH3; lane 6: Rituximab; lane 7: Novex Multimark® molecular weight standards.

[0090] FIG. 46 illustrates effector function as measured in an ADCC assay of 2H7 Ig fusion proteins that contain a mutant CH2 domain or wild type CH2 domain. The percent specific killing of BJAB target cells in the presence of human PBMC effector cells by 2H7 scFv IgG MTH (SSS) MTCH2WTCH3 (diamonds) was compared to 2H7 scFv IgG MTH (SSS) WTCH2CH3 (squares) and 2H7 scFv IgAH IgG WTCH2CH3 (triangles) and Rituximab (circles).

[0091] FIG. 47 shows cell surface expression of an anti-human CD3 scFv IgG WTH WTCH2CH3-CD80 (SEQ ID NO:______) fusion protein on Reh cells (FIG. 47A) and T51 lymphoblastoid cells (FIG. 47B) by flow immunocytofluorimetry.

[0092] FIG. 48 presents the percent specific killing of untransfected Reh and T51 cells and the percent specific killing of Reh cells (Reh anti-hCD3) (FIG. 48A) and T51 cells (T51 anti-hCD3) (FIG. 48B) that were transfected with a construct encoding scFv antibodies specific for human CD3, fused to human IgG1 wild-type hinge-CH2-CH3, which was fused to human CD80 transmembrane and cytoplasmic tail domains (anti-human CD3 scFv IgG WTH WTCH2CH3-CD80 (SEQ ID NO:______). Human PBMC (effector cells) were combined with BJAB target cells at the ratios indicated.

[0093] FIG. 49 illustrates binding of 5B9, an anti-murine CD137 (4-1BB) monoclonal antibody, and a 5B9 scFv IgG fusion protein (5B9 scFv IgG MTH (SSS) WTCH2CH3 (SEQ ID NO:______)) to stimulated human PBMC. Binding of the 5B9 scFv IgG fusion protein was detected by flow immunocytofluorimetry using FITC conjugated goat anti-human IgG. Binding of the 5B9 monoclonal antibody was detected with FITC conjugated goat anti-mouse IgG.

### DETAILED DESCRIPTION OF THE INVENTION

[0094] The present invention is directed to binding domain-immunoglobulin fusion proteins and to related compositions and methods, which will be useful in immunotherapeutic and immunodiagnostic applications, and which offer certain advantages over antigen-specific polypeptides of the prior art. The fusion proteins of the present invention are preferably single polypeptide chains that comprise, in pertinent part, the following fused domains: a binding domain polypeptide, an immunoglobulin hinge region polypeptide, an immunoglobulin heavy chain CH2 constant region polypeptide, and an immunoglobulin heavy chain CH3 constant region polypeptide. According to certain preferred embodiments the fusion proteins of the present invention further comprise a plasma membrane anchor domain. According to certain other preferred embodiments the fusion proteins of the present invention further comprise an immunoglobulin heavy chain CH4 constant region polypeptide. In particularly preferred embodiments, the polypeptide domains of which the binding domain-immunoglobulin fusion protein is comprised are, or are derived from, polypeptides that are the products of human gene sequences, but the invention need not be so limited and may in fact relate to binding domain-immunoglobulin fusion proteins as provided herein that are derived from any natural or artificial source, including genetically engineered and/or mutated polypeptides.

[0095] The present invention relates in part to the surprising observation that the binding domain-immunoglobulin fusion proteins described herein are capable of immunological activity. More specifically, these proteins retain the ability to participate in well known immunological effector activities including antibody dependent cell mediated cytotoxicity (ADCC, e.g., subsequent to antigen binding on a cell surface, engagement and induction of cytotoxic effector cells bearing appropriate Fc receptors, such as natural killer (NK) cells bearing FcRγIII, under appropriate conditions;) and/or complement fixation in complement dependent cytotoxicity (CDC, e.g., subsequent to antigen binding on a cell surface, recruitment and activation of cytolytic proteins that are components of the blood complement cascade; for reviews of ADCC and CDC see, e.g., Carter, 2001 Nat. Rev. Canc. 1:118; Sulica et al., 2001 Int. Rev. Immunol. 20:371; Maloney et al., 2002 Semin. Oncol. 29:2; Sondel et al., 2001; Maloney 2001 Anticanc. Drugs 12 Suppl.2:1-4; IgA activation of complement by the alternative pathway is described, for example, in Schneiderman et al., 1990 J. Immunol. 145:233), despite having structures that would not be expected to be capable of promoting such effector activities. As described in greater detail below, ADCC and CDC are unexpected functions for fusion proteins comprising immunoglobulin heavy chain regions and having the structures described herein, and in particular for immunoglobulin fusion proteins comprising immunoglobulin hinge region polypeptides that are compromised in their ability to form interchain, homodimeric disulfide bonds.

[0096] Another advantage afforded by the present invention is a binding domain-immunoglobulin fusion polypeptide that can be produced in substantial quantities that are typically greater than those routinely attained with single-chain antibody constructs of the prior art. In preferred embodiments, the binding domain-immunoglobulin fusion polypeptides of the present invention are recombinantly expressed in mammalian expression systems, which offer the advantage of providing polypeptides that are stable in vivo (e.g., under physiological conditions). According to non-limiting theory, such stability may derive in part from posttranslational modifications, and specifically glycosylation, of the fusion proteins. Production of the present binding domain-immunoglobulin fusion proteins via recombinant mammalian expression has been attained in static cell cultures at a level of greater than 50 mg protein per liter culture supernatant and has been routinely observed in such cultures at 10-50 mg/l, such that preferably at least 10-50 mg/l may be produced under static culture conditions; also contemplated are enhanced production of the fusion proteins using art-accepted scale-up methodologies such as “fed batch” (i.e., non-static) production, where yields of at least 5-500 mg/l, and in some instances at least 0.5-1 gm/l, depending on the particular protein product, are obtained.

[0097] A binding domain polypeptide according to the present invention may be any polypeptide that possesses the ability to specifically recognize and bind to a cognate biological molecule or complex of more than one molecule or assembly or aggregate, whether stable or transient, of such a molecule, which includes a protein, polypeptide, peptide, amino acid, or derivative thereof; a lipid, fatty acid or the like, or derivative thereof; a carbohydrate, saccharide or the like or derivative thereof, a nucleic acid, nucleotide, nucleoside, purine, pyrimidine or related molecule, or derivative thereof, or the like; or any combination thereof such as, for example, a glycoprotein, a glycopeptide, a glycolipid, a lipoprotein, a proteolipid; or any other biological molecule that may be present in a biological sample. Biological samples may be provided by obtaining a blood sample, biopsy specimen, tissue explant, organ culture, biological fluid or any other tissue or cell preparation from a subject or a biological source. The subject or biological source may be a human or non-human animal, a primary cell culture or culture adapted cell line including but not limited to genetically engineered cell lines that may contain chromosomally integrated or episomal recombinant nucleic acid sequences, immortalized or immortalizable cell lines, somatic cell hybrid cell lines, differentiated or differentiatable cell lines, transformed cell lines and the like. In certain preferred embodiments of the invention, the subject or biological source may be suspected of having or being at risk for having a malignant condition or a B-cell disorder as provided herein, which in certain further preferred embodiments may be an autoimmune disease, and in certain other preferred embodiments of the invention the subject or biological source may be known to be free of a risk or presence of such disease.

[0098] A binding domain polypeptide may therefore be any naturally occurring or recombinantly produced binding partner for a cognate biological molecule as provided herein that is a target structure of interest, herein referred to as an “antigen” but intended according to the present disclosure to encompass any target biological molecule to which it is desirable to have the subject invention fusion protein specifically bind. Binding domain-immunoglobulin fusion proteins are defined to be “immunospecific” or capable of specifically binding if they bind a desired target molecule such as an antigen as provided herein, with a Kₐ of greater than or equal to about 10⁴ M⁻¹, preferably of greater than or equal to about 10⁵ M⁻¹, more preferably of greater than or equal to about 10⁶ M⁻¹ and still more preferably of greater than or equal to about 10⁷ M⁻¹. Affinities of binding domain-immunoglobulin fusion proteins according to the present invention can be readily determined using conventional techniques, for example those described by Scatchard et al., Ann. N.Y. Acad. Sci. 51:660 (1949). Such determination of fusion protein binding to target antigens of interest can also be performed using any of a number of known methods for identifying and obtaining proteins that specifically interact with other proteins or polypeptides, for example, a yeast two-hybrid screening system such as that described in U.S. Pat. No. 5,283,173 and U.S. Pat. No. 5,468,614, or the equivalent.

[0099] Preferred embodiments of the subject invention binding domain-immunoglobulin fusion protein comprise binding domains that include at least one immunoglobulin variable region polypeptide, such as all or a portion or fragment of a heavy chain or a light chain V-region, provided it is capable of specifically binding an antigen or other desired target structure of interest as described herein. In other preferred embodiments the binding domain comprises a single chain immunoglobulin-derived Fv product, which may include all or a portion of at least one immunoglobulin light chain V-region and all or a portion of at least one immunoglobulin heavy chain V-region, and which further comprises a linker fused to the V-regions; preparation and testing such constructs are described in greater detail herein and are well known in the art. As described herein and as also known in the art, immunoglobulins comprise products of a gene family the members of which exhibit a high degree of sequence conservation, such that amino acid sequences of two or more immunoglobulins or immunoglobulin domains or regions or portions thereof (e.g., VH domains, VL domains, hinge regions, CH2 constant regions, CH3 constant regions) can be aligned and analyzed to identify portions of such sequences that correspond to one another, for instance, by exhibiting pronounced sequence homology. Determination of sequence homology may be readily determined with any of a number of sequence alignment and analysis tools, including computer algorithms well known to those of ordinary skill in the art, such as Align or the BLAST algorithm (Altschul, J. Mol. Biol. 219:555-565, 1991; Henikoff and Henikoff, Proc. Natl. Acad. Sci. USA 89:10915-10919, 1992), which is available at the NCBI website (http://www/ncbi.nlm.nih.gov/cgi-bin/BLAST). Default parameters may be used.

[0100] Portions of a particular immunoglobulin reference sequence and of any one or more additional immunoglobulin sequences of interest that may be compared to the reference sequence are regarded as “corresponding” sequences, regions, fragments or the like, based on the convention for numbering immunoglobulin amino acid positions according to Kabat, Sequences of Proteins of Immunological Interest, (5^{th} ed. Bethesda, Md.: Public Health Service, National Institutes of Health (1991)). For example, according to this convention, the immunoglobulin family to which an immunoglobulin sequence of interest belongs is determined based on conservation of variable region polypeptide sequence invariant amino acid residues, to identify a particular numbering system for the immunoglobulin family, and the sequence(s) of interest can then be aligned to assign sequence position numbers to the individual amino acids which comprise such sequence(s). Preferably at least 70%, more preferably at least 80%-85% or 86%-89%, and still more preferably at least 90%, 92%, 94%, 96%, 98% or 99% of the amino acids in a given amino acid sequence of at least 1000, more preferably 700-950, more preferably 350-700, still more preferably 100-350, still more preferably 80-100, 70-80, 60-70, 50-60, 40-50 or 30-40 consecutive amino acids of a sequence, are identical to the amino acids located at corresponding positions in a reference sequence such as those disclosed by Kabat (1991) or in a similar compendium of related immunoglobulin sequences, such as may be generated from public databases (e.g., Genbank, SwissProt, etc.) using sequence alignment tools as described above. In certain preferred embodiments, an immunoglobulin sequence of interest or a region, portion, derivative or fragment thereof is greater than 95% identical to a corresponding reference sequence, and in certain preferred embodiments such a sequence of interest may differ from a corresponding reference at no more than 1, 2, 3, 4, 5, 6, 7, 8, 9 or 10 amino acid positions.

[0101] For example, in certain embodiments the present invention is directed to a binding domain-immunoglobulin fusion protein comprising in pertinent part a human immunoglobulin heavy chain variable region polypeptide comprising a mutation at an amino acid at a location corresponding to amino acid position 11 in SEQ ID NO:______, which comprises a murine VH-derived sequence, and regarding which it is noteworthy that at a relatively limited number of immunoglobulin VH sequence positions, including position 11, amino acid conservation is observed in the overwhelming majority of VH sequences analyzed across mammalian species lines (e.g., Leu11, Val37, Gly44, Leu45, Trp47; Nguyen et al., 1998 J. Mol. Biol 275:413). These amino acid side chains are located at the surface of the variable domain (V_{H}), where they may contact residues of the C_{H}1 (Leu11) and the V_{L} domains (Val37, Gly44, Leu45, and Trp47) and may, in the absence of light chains, contribute to stability and solubility of the protein (see, e.g., Chothia et al., 1985 J. Mol. Biol. 186:651; Muyldermans et al., 1994 Prot. Engineer. 7:1129; Desmyter et al., 1996 Nat. Struct. Biol. 3:803; Davies et al., 1994 FEBS Lett. 339:285). As another example, by reference to immunoglobulin sequence compendia and databases such as those cited above, the relatedness of two or more immunoglobulin sequences to each other can readily and without undue experimentation be established in a manner that permits identification of the animal species of origin, the class and subclass (e.g., isotype) of a particular immunoglobulin or immunoglobulin region polypeptide sequence. Any immunoglobulin variable region polypeptide sequence, including VH and/or VL and/or single-chain variable region (sFv) sequences or other V region-derived sequences or the like, may be used as a binding domain. Preferred embodiments include immunoglobulin V region polypeptide sequences derived from monoclonal antibodies such as murine or other rodent antibodies, or monoclonal antibodies derived from other sources such as goat, rabbit, equine, bovine, camelid or other species, including transgenic animals, and also including human or humanized monoclonal antibodies. Non-limiting examples include variable region polypeptide sequences derived from mAb such as those described in greater detail in the Examples below, for instance, CD20-specific murine monoclonal antibodies (e.g., 2H7), mAb L6 (specific for a carbohydrate-defined epitope and available from American Type Culture Collection, Manassas, Va., as hybridoma HB8677), and mAb specific for CD28 (e.g., mAb 2E12), CD40, CD80, CD137 (e.g., mAb 5B9 or mAb 1D8 which recognizes the murine homologue of CD137, 41BB) and CD152 (CTLA-4).

[0102] Other binding domain polypeptides may comprise any protein or portion thereof that retains the ability to specifically bind an antigen as provided herein, including non-immunoglobulins. Accordingly the invention contemplates fusion proteins comprising binding domain polypeptides that are derived from polypeptide ligands such as hormones, cytokines, chemokines, and the like; cell surface or soluble receptors for such polypeptide ligands; lectins; intercellular adhesion receptors such as specific leukocyte integrins, selectins, immunoglobulin gene superfamily members, intercellular adhesion molecules (ICAM-1, -2, -3) and the like; histocompatibility antigens; etc.

[0103] Examples of cell surface receptors that may provide a binding domain polypeptide, and that may also be selected as the target molecule or antigen to which a binding domain-Ig fusion protein of the present invention desirably binds, include the following, or the like: HER1 (e.g., GenBank Accession Nos. U48722, SEG_HEGFREXS, KO3193), HER2 (Yoshino et al., 1994 J. Immunol. 152:2393; Disis et al., 1994 Canc. Res. 54:16; see also, e.g., GenBank Acc. Nos. X03363, M17730, SEG_HUMHER20), HER3 (e.g., GenBank Acc. Nos. U29339, M34309), HER4 (Plowman et al., 1993 Nature 366:473; see also e.g., GenBank Acc. Nos. L07868, T64105), epidermal growth factor receptor (EGFR) (e.g., GenBank Acc. Nos. U48722, SEG_HEGFREXS, KO3193), vascular endothelial cell growth factor(e.g., GenBank No. M32977), vascular endothelial cell growth factor receptor (e.g., GenBank Acc. Nos. AF022375, 1680143, U48801, X62568), insulin-like growth factor-I (e.g., GenBank Acc. Nos. X00173, X56774, X56773, X06043, see also European Patent No. GB 2241703), insulin-like growth factor-II (e.g., GenBank Acc. Nos. X03562, X00910, SEG_HUMGFIA, SEG_HUMGFI2, M17863, M17862), transferrin receptor (Trowbridge and Omary, 1981 Proc. Nat. Acad. USA 78:3039; see also e.g., GenBank Acc. Nos. X01060, M11507), estrogen receptor (e.g., GenBank Acc. Nos. M38651, X03635, X99101, U47678, M12674), progesterone receptor (e.g., GenBank Acc. Nos. X51730, X69068, M15716), follicle stimulating hormone receptor (FSH-R) (e.g., GenBank Acc. Nos. Z34260, M65085), retinoic acid receptor (e.g., GenBank Acc. Nos. L12060, M60909, X77664, X57280, X07282, X06538), MUC-1 (Barnes et al., 1989 Proc. Nat. Acad. Sci. USA 86:7159; see also e.g., GenBank Acc. Nos. SEG_MUSMUCIO, M65132, M64928) NY-ESO-1 (e.g., GenBank Acc. Nos. AJ003149, U87459), NA 17-A (e.g., European Patent No. WO 96/40039), Melan-A/MART-1 (Kawakami et al., 1994 Proc. Nat. Acad. Sci. USA 91:3515; see also e.g., GenBank Acc. Nos. U06654, U06452), tyrosinase (Topalian et al., 1994 Proc. Nat. Acad. Sci. USA 91:9461; see also e.g., GenBank Acc. Nos. M26729, SEG_HUMTYR0, see also Weber et al., J. Clin. Invest (1998) 102:1258), Gp-100 (Kawakami et al., 1994 Proc. Nat. Acad. Sci. USA 91:3515; see also e.g., GenBank Acc. No. S73003, see also European Patent No. EP 668350; Adema et al., 1994 J. Biol. Chem. 269:20126), MAGE (van den Bruggen et al., 1991 Science 254:1643; see also e.g, GenBank Acc. Nos. U93163, AF064589, U66083, D32077, D32076, D32075, U10694, U10693, U10691, U10690, U10689, U10688, U10687, U10686, U10685, L18877, U10340, U10339, L18920, U03735, M77481), BAGE (e.g., GenBank Acc. No. U19180, see also U.S. Pat. Nos. 5,683,886 and 5,571,711), GAGE (e.g., GenBank Acc. Nos. AF055475, AF055474, AF055473, U19147, U19146, U19145, U19144, U19143, U19142), any of the CTA class of receptors including in particular HOM-MEL-40 antigen encoded by the SSX2 gene (e.g., GenBank Acc. Nos. X86175, U90842, U90841, X86174), carcinoembyonic antigen (CEA, Gold and Freedman, 1985 J. Exp. Med. 121:439; see also e.g., GenBank Acc. Nos. SEG_HUMCEA, M59710, M59255, M29540), and PyLT (e.g., GenBank Acc. Nos. J02289, J02038).

[0104] Additional cell surface receptors that may be sources of binding domain polypeptides or that may be cognate antigens include the following, or the like: CD2 (e.g., GenBank Acc. Nos. Y00023, SEG_HUMCD2, M16336, M16445, SEG_MUSCD2, M14362), 4-1BB (CDw137, Kwon et al., 1989 Proc. Nat. Acad. Sci. USA 86:1963, 4-1BB ligand (Goodwin et al., 1993 Eur. J. Immunol. 23:2361; Melero et al., 1998 Eur. J. Immunol. 3:116), CD5 (e.g., GenBank Acc. Nos. X78985, X89405), CD10 (e.g., GenBank Acc. Nos. M81591, X76732) CD27 (e.g., GenBank Acc. Nos. M63928, L24495, L08096), CD28 (June et al., 1990 Immunol. Today 11:211; see also, e.g., GenBank Acc. Nos. J02988, SEG_HUMCD28, M34563), CD152/CTLA-4 (e.g., GenBank Acc. Nos. L15006, X05719, SEG_HUMIGCTL), CD40 (e.g., GenBank Acc. Nos. M83312, SEG_MUSC040A0, Y10507, X67878, X96710, U15637, L07414), interferon-γ (IFN-γ; see, e.g., Farrar et al. 1993 Ann. Rev. Immunol. 11:571 and references cited therein, Gray et al. 1982 Nature 295:503, Rinderknecht et al. 1984 J. Biol. Chem. 259:6790, DeGrado et al. 1982 Nature 300:379), interleukin-4 (IL-4; see, e.g., 53^{rd} Forum in Immunology, 1993 Research in Immunol. 144:553-643; Banchereau et al., 1994 in The Cytokine Handbook, 2^{nd} ed., A. Thomson, ed., Academic Press, NY, p. 99; Keegan et al., 1994 J Leukocyt. Biol. 55:272, and references cited therein), interleukin-17 (IL-17) (e.g., GenBank Acc. Nos. U32659, U43088) and interleukin-17 receptor (IL-17R) (e.g., GenBank Acc. Nos. U31993, U58917). Notwithstanding the foregoing, the present invention expressly does not encompass any immunoglobulin fusion protein that is disclosed in U.S. Pat. No. 5,807,734, U.S. Pat. No. 5,795,572 or U.S. Pat. No. 5,807,734.

[0105] Additional cell surface receptors that may be sources of binding domain polypeptides or that may be cognate antigens include the following, or the like: CD59 (e.g., GenBank Acc. Nos. SEG_HUMCD590, M95708, M34671), CD48 (e.g., GenBank Acc. Nos. M59904), CD58/LFA-3 (e.g., GenBank Acc. No. A25933, Y00636, E12817; see also JP 1997075090-A), CD72 (e.g., GenBank Acc. Nos. AA311036, S40777, L35772), CD70 (e.g., GenBank Acc. Nos. Y13636, S69339), CD80/B7.1 (Freeman et al., 1989 J. Immunol. 43:2714; Freeman et al., 1991 J. Exp. Med. 174:625; see also e.g., GenBank Acc. Nos. U33208, I683379), CD86/B7.2 (Freeman et al., 1993 J. Exp. Med. 178:2185, Boriello et al., 1995 J. Immunol. 155:5490; see also, e.g., GenBank Acc. Nos. AF099105, SEG_MMB72G, U39466, U04343, SEG_HSB725, L25606, L25259), B7-H1/B7-DC (e.g., Genbank Acc. Nos. NM_{—}014143, AF177937, AF317088; Dong et al., 2002 Nat. Med. June 24 [epub ahead of print], PMID 12091876; Tseng et al., 2001 J. Exp. Med. 193:839; Tamura et al., 2001 Blood 97:1809; Dong et al., 1999 Nat. Med. 5:1365), CD40 ligand (e.g., GenBank Acc. Nos. SEG_HUMCD40L, X67878, X65453, L07414), IL-17 (e.g., GenBank Acc. Nos. U32659, U43088), CD43 (e.g., GenBank Acc. Nos. X52075, J04536), ICOS (e.g., Genbank Acc. No. AH011568), CD3 (e.g., Genbank Acc. Nos. NM_{—}000073 (gamma subunit), NM_{—}000733 (epsilon subunit), X73617 (delta subunit)), CD4 (e.g., Genbank Acc. No. NM_{—}000616), CD25 (e.g., Genbank Acc. No. NM_{—}000417), CD8 (e.g., Genbank Acc. No.M12828), CD11b (e.g., Genbank Acc. No. J03925), CD14 (e.g., Genbank Acc. No. XM_{—}039364), CD56 (e.g., Genbank Acc. No.U63041), CD69 (e.g., Genbank Acc. No.NM_{—}001781) and VLA-4 (α₄β₇) (e.g., GenBank Acc. Nos. L12002, X16983, L20788, U97031, L24913, M68892, M95632). The following cell surface receptors are typically associated with B cells: CD19 (e.g., GenBank Acc. Nos. SEG_HUMCD19W0, M84371, SEG_MUSCD19W, M62542), CD20 (e.g., GenBank Acc. Nos. SEG_HUMCD20, M62541), CD22 (e.g., GenBank Acc. Nos. I680629, Y10210, X59350, U62631, X52782, L16928), CD30 (e.g., Genbank Acc. Nos. M83554, D86042), CD153 (CD30 ligand, e.g., GenBank Acc. Nos. L09753, M83554), CD37 (e.g., GenBank Acc. Nos. SEG_MMCD37X, X14046, X53517), CD50 (ICAM-3, e.g., GenBank Acc. No. NM_{—}002162), CD106 (VCAM-1) (e.g., GenBank Acc. Nos. X53051, X67783, SEG_MMVCAM1C, see also U.S. Pat. No. 5,596,090), CD54 (ICAM-1) (e.g., GenBank Acc. Nos. X84737, S82847, X06990, J03132, SEG_MUSICAM0), interleukin-12 (see, e.g., Reiter et al, 1993 Crit. Rev. Immunol. 13:1, and references cited therein), CD134 (OX40, e.g., GenBank Acc. No. AJ277151), CD137 (41BB, e.g., GenBank Acc. No. L12964, NM_{—}001561), CD83 (e.g., GenBank Acc. Nos. AF001036, AL021918), DEC-205 (e.g., GenBank Acc. Nos. AF011333, U19271).

[0106] Binding domain-immunoglobulin fusion proteins of the present invention comprise a binding domain polypeptide that, according to certain particularly preferred embodiments, is capable of specifically binding at least one antigen that is present on an immune effector cell. According to non-limiting theory, such binding domain-Ig fusion proteins may advantageously recruit desired immune effector cell function(s) in a therapeutic context, where it is well known that immune effector cells having different specialized immune functions can be distinguished from one another on the basis of their differential expression of a wide variety of cell surface antigens, such as many of the antigens described herein to which binding domain polypeptides can specifically bind. Immune effector cells include any cell that is capable of directly mediating an activity which is a component of immune system function, including cells having such capability naturally or as a result of genetic engineering.

[0107] In certain embodiments an immune effector cell comprises a cell surface receptor for an immunoglobulin, such as a receptor for an immunoglobulin constant region and including the class of receptors commonly referred to as “Fc receptors” (FcR). A number of FcR have been structurally and/or functionally characterized and are well known in the art, including FcR having specific abilities to interact with a restricted subset of immunoglobulin heavy chain isotypes, or that interact with Fc domains with varying affinities, and/or which may be expressed on restricted subsets of immune effector cells under certain conditions (e.g., Kijimoto-Ochichai et al., 2002 Cell Mol. Life Sci. 59:648; Davis et al., 2002 Curr. Top. Microbiol. Immunol. 266:85; Pawankar, 2001 Curr. Opin. Allerg. Clin. Immunol. 1:3; Radaev et al., 2002 Mol. Immunol. 38:1073; Wurzburg et al., 2002 Mol. Immunol. 38:1063; Sulica et al., 2001 Int. Rev. Immunol. 20:371; Underhill et al., 2002 Ann. Rev. Immunol. 20:825; Coggeshall, 2002 Curr. Dir. Autoimm. 5:1; Mimura et al., 2001 Adv. Exp. Med. Biol. 495:49; Baumann et al., 2001 Adv. Exp. Med. Biol. 495:219; Santoso et al., 2001 Ital. Heart J. 2:811; Novak et al., 2001 Curr. Opin. Immunol. 13:721; Fossati et al., 2001 Eur. J. Clin. Invest. 31:821).

[0108] Cells that are capable of mediating ADCC are preferred examples of immune effector cells according to the present invention. Other preferred examples include natural killer (NK) cells, tumor-infiltrating T lymphocytes (TIL), cytotoxic T lymphocytes (CTL), and granulocytic cells such as cells that comprise allergic response mechanisms. Immune effector cells thus include, but are not limited to, cells of hematopoietic origins including cells at various stages of differentiation within myeloid and lymphoid lineages and which may (but need not) express one or more types of functional cell surface FcR, such as T lymphocytes, B lymphocytes, NK cells, monocytes, macrophages, dendritic cells, neutrophils, basophils, eosinophils, mast cells, platelets, erythrocytes, and precursors, progenitors (e.g., hematopoietic stem cells), quiescent, activated and mature forms of such cells. Other immune effector cells may include cells of non-hematopoietic origin that are capable of mediating immune functions, for example, endothelial cells, keratinocytes, fibroblasts, osteoclasts, epithelial cells and other cells. Immune effector cells may also include cells that mediate cytotoxic or cytostatic events, or endocytic, phagocytic, or pinocytotic events, or that effect induction of apoptosis, or that effect microbial immunity or neutralization of microbial infection, or cells that mediate allergic, inflammatory, hypersensitivity and/or autoimmune reactions.

[0109] Allergic response mechanisms are well known in the art and include an antigen (e.g., allergen)-specific component such as an immunoglobulin (e.g., IgE), as well as the cells and mediators which comprise sequelae to allergen-immunoglobulin (e.g., IgE) encounters (e.g., Ott et al., 2000 J. Allerg. Clin. Immunol. 106:429; Barnes, 2000 J. Allerg. Clin. Immunol. 106:5; Togias, 2000 J. Allerg. Clin. Immunol. 105:S599; Akdis et al., 2000 Int. Arch. Allerg. Immunol. 121:261; Beach, 2000 Occup. Med. 15:455). Particularly with regard to binding domain-immunoglobulin fusion proteins of the present invention that interact with FcR, certain embodiments of the present invention contemplate fusion proteins that comprise one or more IgE-derived domains and that are capable of inducing an allergic response mechanism that comprises IgE-specific FcR, as also noted above and as described in the cited references. Without wishing to be bound by theory, and as disclosed herein, fusion proteins of the present invention may comprise portions of IgE heavy chain Fc domain polypeptides, whether expressed as cell surface proteins (e.g., with a plasma membrane anchor domain) or as soluble proteins (e.g., without a plasma membrane anchor domain). Further according to non-limiting theory, recruitment and induction of an allergic response mechanism (e.g., an FcR-epsilon expressing immune effector cell) may proceed as the result of either or both of the presence of an IgE Fc domain (e.g., that is capable of triggering an allergic mechanism by FcR crosslinking) and the presence of the cognate antigen to which the binding domain specifically binds. The present invention therefore exploits induction of allergic response mechanisms in heretofore unappreciated contexts, such as treatment of a malignant condition or a B-cell disorder as described herein.

[0110] An immunoglobulin hinge region polypeptide, as discussed above, includes any hinge peptide or polypeptide that occurs naturally, as an artificial peptide or as the result of genetic engineering and that is situated in an immunoglobulin heavy chain polypeptide between the amino acid residues responsible for forming intrachain immunoglobulin-domain disulfide bonds in CH1 and CH2 regions; hinge region polypeptides for use in the present invention may also include a mutated hinge region polypeptide. Accordingly, an immunoglobulin hinge region polypeptide may be derived from, or may be a portion or fragment of (i.e., one or more amino acids in peptide linkage, typically 15-115 amino acids, preferably 95-110, 80-94, 60-80, or 5-65 amino acids, preferably 10-50, more preferably 15-35, still more preferably 18-32, still more preferably 20-30, still more preferably 21, 22, 23, 24, 25, 26, 27, 28 or 29 amino acids) an immunoglobulin polypeptide chain region classically regarded as having hinge function, as described above, but a hinge region polypeptide for use in the instant invention need not be so restricted and may include amino acids situated (according to structural criteria for assigning a particular residue to a particular domain that may vary, as known in the art) in an adjoining immunoglobulin domain such as a CH1 domain or a CH2 domain, or in the case of certain artificially engineered immunoglobulin constructs, an immunoglobulin variable region domain.

[0111] Wild-type immunoglobulin hinge region polypeptides include any naturally occurring hinge region that is located between the constant region domains, CH1 and CH2, of an immunoglobulin. The wild-type immunoglobulin hinge region polypeptide is preferably a human immunoglobulin hinge region polypeptide, preferably comprising a hinge region from a human IgG, IgA or IgE immunoglobulin, and more preferably, a hinge region polypeptide from a wild-type or mutated human IgG1 isotype as described herein. As is known to the art, despite the tremendous overall diversity in immunoglobulin amino acid sequences, immunoglobulin primary structure exhibits a high degree of sequence conservation in particular portions of immunoglobulin polypeptide chains, notably with regard to the occurrence of cysteine residues which, by virtue of their sulfyhydryl groups, offer the potential for disulfide bond formation with other available sulfydryl groups. Accordingly, in the context of the present invention wild-type immunoglobulin hinge region polypeptides may be regarded as those that feature one or more highly conserved (e.g., prevalent in a population in a statistically significant manner) cysteine residues, and in certain preferred embodiments a mutated hinge region polypeptide may be selected that contains zero or one cysteine residue and that is derived from such a wild-type hinge region.

[0112] In certain preferred embodiments wherein the hinge region polypeptide is a mutated human IgG1 immunoglobulin hinge region polypeptide that is derived from a wild-type hinge region, it is noted that the wild-type human IgG1 hinge region polypeptide sequence comprises three non-adjacent cysteine residues, referred to as a first cysteine of the wild-type hinge region, a second cysteine of the wild-type hinge region and a third cysteine of the wild-type hinge region, respectively, proceeding along the hinge region sequence from the polypeptide N-terminus toward the C-terminus. Accordingly, in certain such embodiments of the present invention, the mutated human IgG1 immunoglobulin hinge region polypeptide contains two cysteine residues and the first cysteine of the wild-type hinge region is not mutated. In certain other embodiments of the present invention the mutated human IgG1 immunoglobulin hinge region polypeptide contains no more than one cysteine residue, and in certain other embodiments the mutated human IgG1 immunoglobulin hinge region polypeptide contains no cysteine residues.

[0113] The binding domain-immunoglobulin fusion proteins of the present invention expressly do not contemplate any fusion protein that is disclosed in U.S. Pat. No. 5,892,019. For example, and as disclosed in U.S. Pat. No. 5,892,019, a mutated human IgG1 hinge region described therein has a substitution or deletion of the first IgG1 hinge region cysteine residue, but retains both of the second and third IgG1 hinge region cysteine residues that correspond to the second and third cysteines of the wild-type IgG1 hinge region sequence. This reference discloses that the first cysteine residue of the wild-type IgG1 hinge region is replaced to prevent interference, by the first cysteine residue, with proper assembly of the single chain immunoglobulin-like polypeptide described therein into an immunoglobulin-like dimer. As also disclosed in this reference, the second and third cysteines of the IgG1 hinge region are retained to provide interchain disulfide linkage between two heavy chain constant regions to promote dimer formation, which further according to U.S. Pat. No. 5,892,019 results in an immunoglobulin-like dimer having effector function such as ADCC capability.

[0114] By contrast and as described herein, the binding domain-immunogloblin fusion proteins of the present invention, which are capable of ADCC, are not so limited and may comprise, in pertinent part, (i) a wild-type human IgG1 immunoglobulin hinge region polypeptide, (ii) a mutated human IgG1 immunoglobulin hinge region polypeptide that is derived from a wild-type immunoglobulin hinge region polypeptide having three or more cysteine residues, wherein the mutated human IgG1 immunoglobulin hinge region polypeptide contains two cysteine residues and wherein a first cysteine of the wild-type hinge region is not mutated, (iii) a mutated human IgG1 immunoglobulin hinge region polypeptide that is derived from a wild-type immunoglobulin hinge region polypeptide having three or more cysteine residues, wherein the mutated human IgG1 immunoglobulin hinge region polypeptide contains no more than one cysteine residue, or (iv) a mutated human IgG1 immunoglobulin hinge region polypeptide that is derived from a wild-type immunoglobulin hinge region polypeptide having three or more cysteine residues, wherein the mutated human IgG1 immunoglobulin hinge region polypeptide contains no cysteine residues. In particular, the present invention thus offers unexpected advantages associated with retention by the fusion proteins described herein of the ability to mediate ADCC even where the ability to dimerize via IgG1 hinge region interchain disulfide bonds is ablated or compromised by the removal or replacement of one, two or three hinge region cysteine residues, and even where the first cysteine of the IgG1 hinge region is not mutated.

[0115] A mutated immunoglobulin hinge region polypeptide may comprise a hinge region that has its origin in an immunoglobulin of a species, of an immunoglobulin isotype or class, or of an immunoglobulin subclass that is different from that of the CH2 and CH3 domains. For instance, in certain embodiments of the invention, the binding domain-immunoglobulin fusion protein may comprise a binding domain polypeptide that is fused to an immunoglobulin hinge region polypeptide comprising a wild-type human IgA hinge region polypeptide, or a mutated human IgA hinge region polypeptide that contains zero or only one cysteine residues, as described herein, or a wild-type human IgG1 hinge region polypeptide or a wild-type human IgE hinge region polypeptide or a mutated human IgG1 hinge region polypeptide that is mutated to contain zero, one or two cysteine residues wherein the first cysteine of the wild-type hinge region is not mutated, as also described herein. Such a hinge region polypeptide may be fused to an immunoglobulin heavy chain CH2 region polypeptide from a different Ig isotype or class, for example an IgA or an IgE or an IgG subclass, which in certain preferred embodiments will be the IgG1 subclass and in certain other preferred embodiments may be any one of the IgG2, IgG3 or IgG4 subclasses.

[0116] For example, and as described in greater detail below, in certain embodiments of the present invention an immunoglobulin hinge region polypeptide is selected which is derived from a wild-type human IgA hinge region that naturally comprises three cysteines, where the selected hinge region polypeptide is truncated relative to the complete hinge region such that only one of the cysteine residues remains (e.g., SEQ ID NOS:35-36). Similarly, in certain other embodiments of the invention, the binding domain-immunoglobulin fusion protein comprises a binding domain polypeptide that is fused to an immunoglobulin hinge region polypeptide comprising a mutated hinge region polypeptide in which the number of cysteine residues is reduced by amino acid substitution or deletion, for example a mutated IgG1 hinge region containing zero, one or two cysteine residues as described herein. A mutated hinge region polypeptide may thus be derived from a wild-type immunoglobulin hinge region that contains one or more cysteine residues. In certain embodiments, a mutated hinge region polypeptide may contain zero or only one cysteine residue, wherein the mutated hinge region polypeptide is derived from a wild type immunoglobulin hinge region that contains, respectively, one or more or two or more cysteine residues. In the mutated hinge region polypeptide, the cysteine residues of the wild-type immunoglobulin hinge region are preferably substituted with amino acids that are incapable of forming a disulfide bond. In one embodiment of the invention, the mutated hinge region polypeptide is derived from a human IgG wild-type hinge region polypeptide, which may include any of the four human IgG isotype subclasses, IgG1, IgG2, IgG3 or IgG4. In certain preferred embodiments, the mutated hinge region polypeptide is derived from a human IgG1 wild-type hinge region polypeptide. By way of example, a mutated hinge region polypeptide derived from a human IgG1 wild-type hinge region polypeptide may comprise mutations at two of the three cysteine residues in the wild-type immunoglobulin hinge region, or mutations at all three cysteine residues.

[0117] The cysteine residues that are present in a wild-type immunoglobulin hinge region and that are removed by mutagenesis according to particularly preferred embodiments of the present invention include cysteine residues that form, or that are capable of forming, interchain disulfide bonds. Without wishing to be bound by theory, the present invention contemplates that mutation of such hinge region cysteine residues, which are believed to be involved in formation of interchain disulfide bridges, reduces the ability of the subject invention binding domain-immunoglobulin fusion protein to dimerize (or form higher oligomers) via interchain disulfide bond formation, while surprisingly not ablating the ability of the fusion protein to promote antibody dependent cell-mediated cytotoxicity (ADCC) or to fix complement. In particular, the Fc receptors (FcR) which mediate ADCC (e.g., FCRIII, CD16) exhibit low affinity for immunoglobulin Fc domains, suggesting that functional binding of Fc to FcR requires avidity stabilization of the Fc-FcR complex by virtue of the dimeric structure of heavy chains in a conventional antibody, and/or FcR aggregation and cross-linking by a conventional Ab Fc structure. (Sonderman et al., 2000 Nature 406:267; Radaev et al., 2001 J. Biol. Chem. 276:16469; Radaev et al., 2001 J. Biol. Chem. 276:16478; Koolwijk et al., 1989 J. Immunol 143:1656; Kato et al., 2000 Immunol. Today 21:310.) Hence, the binding domain-immunoglobulin fusion proteins of the present invention provide the advantages associated with single-chain immunoglobulin fusion proteins while also unexpectedly retaining immunological activity. Similarly, the ability to fix complement is typically associated with immunoglobulins that are dimeric with respect to heavy chain constant regions such as those that comprise Fc, while the binding domain-immunoglobulin fusion proteins of the present invention, which may, due to the replacement or deletion of hinge region cysteine residues or due to other structural modifications as described herein, have compromised or ablated abilities to form interchain disulfide bonds, exhibit the unexpected ability to fix complement. Additionally, according to certain embodiments of the present invention wherein a binding domain-immunoglobulin fusion protein may comprise one or more of a human IgE hinge region polypeptide, a human IgE CH2 constant region polypeptide, a human IgE CH3 constant region polypeptide, and a human IgE CH4 constant region polypeptide, the invention fusion proteins unexpectedly retain the immunological activity of mediating ADCC and/or of inducing an allergic response mechanism.

[0118] Selection of an immunoglobulin hinge region polypeptide according to certain embodiments of the subject invention binding domain-immunoglobulin fusion proteins may relate to the use of an “alternative hinge region” polypeptide sequence, which includes a polypeptide sequence that is not necessarily derived from any immunoglobulin hinge region sequence per se. Instead, an alternative hinge region refers to a hinge region polypeptide that comprises an amino acid sequence of at least ten consecutive amino acids, and in certain embodiments at least 11, 12, 13, 14, 15, 16, 17, 18, 19, 20, 21-25, 26-30, 31-50, 51-60, 71-80, 81-90, or 91-110 amino acids that is present in a sequence selected from any one of SEQ ID NOS:___-___, for example a polypeptide sequence derived from a region located between intrachain disulfide-generated immunoglobulin-like loop domains of immunoglobulin gene superfamily members such as CD2 (e.g., Genbank Acc. No. NM_{—}001767), CD4 (e.g., Genbank Acc. No. NM_{—}000616), CD5 (e.g., Genbank Acc. No. BC027901), CD6 (e.g., Genbank Acc. No. NM_{—}006725), CD7 (e.g., Genbank Acc. Nos. XM_{—}046782, BC009293, NM_{—}006137) or CD8 (e.g., Genbank Acc. No. M12828), or other Ig superfamily members. By way of non-limiting example, an alternative hinge region may provide a glycosylation site as provided herein, or may provide a human gene-derived polypeptide sequence for purposes of enhancing the degree of “humanization” of a fusion protein, or may comprise an amino acid sequence that reduces the ability of a fusion protein to form multimers or oligomers or aggregates or the like. Certain alternative hinge region polypeptide sequences as described herein may be derived from the polypeptide sequences of immunoglobulin gene superfamily members that are not actual immunoglobulins per se. For instance and according to non-limiting theory, certain polypeptide sequences that are situated between intrachain disulfide-generated immunoglobulin loop domain of immunoglobulin gene super-family member proteins may be used as alternative hinge region polypeptides as provided herein, or may be further modified for such use.

[0119] As noted above, binding domain-immunoglobulin fusion proteins are believed, according to non-limiting theory, to be compromised in their ability to dimerize via interchain disulfide bond formation, and further according to theory, this property is a consequence of a reduction in the number of cysteine residues that are present in the immunoglobulin hinge region polypeptide selected for inclusion in the construction of the fusion protein. Determination of the relative ability of a polypeptide to dimerize is well within the knowledge of the relevant art, where any of a number of established methodologies may be applied to detect protein dimerization (see, e.g., Scopes, Protein Purification: Principles and Practice, 1987 Springer-Verlag, New York). For example, biochemical separation techniques for resolving proteins on the basis of molecular size (e.g., gel electrophoresis, gel filtration chromatography, analytical ultracentrifugation, etc.), and/or comparison of protein physicochemical properties before and after introduction of sulfhydryl-active (e.g., iodoacetamide, N-ethylmaleimide) or disulfide-reducing (e.g., 2-mercaptoethanol, dithiothreitol) agents, or other equivalent methodologies, may all be employed for determining a degree of polypeptide dimerization or oligomerization, and for determining possible contribution of disulfide bonds to such potential quarternary structure. In certain embodiments, the invention relates to a binding domain-immunoglobulin fusion protein that exhibits a reduced (i.e., in a statistically significant manner relative to an appropriate IgG-derived control) ability to dimerize, relative to a wild-type human immunoglobulin G hinge region polypeptide as provided herein. Accordingly, those familiar with the art will be able readily to determine whether a particular fusion protein displays such reduced ability to dimerize.

[0120] Compositions and methods for preparation of immunoglobulin fusion proteins are well known in the art, as described for example, in U.S. Pat. No. 5,892,019, which discloses recombinant antibodies that are the products of a single encoding polynucleotide but which are not binding domain-immunoglobulin fusion proteins according to the present invention.

[0121] For an immunoglobulin fusion protein of the invention which is intended for use in humans, the constant regions will typically be of human sequence origin, to minimize a potential anti-human immune response and to provide appropriate effector functions. Manipulation of sequences encoding antibody constant regions is described in the PCT publication of Morrison and Oi, WO 89/07142. In particularly preferred embodiments, the CH1 domain is deleted and the carboxyl end of the binding domain, or where the binding domain comprises two immunoglobulin variable region polypeptides, the second (i.e., more proximal to the C-terminus) variable region is joined to the amino terminus of CH2 through the hinge region. A schematic diagram depicting the structures of two exemplary binding domain-immunoglobulin fusion proteins is shown in FIG. 11, where it should be noted that in particularly preferred embodiments no interchain disulfide bonds are present, and in other embodiments a restricted number of interchain disulfide bonds may be present relative to the number of such bonds that would be present if wild-type hinge region polypeptides were instead present, and that in other embodiments the fusion protein comprises a mutated hinge region polypeptide that exhibits a reduced ability to dimerize, relative to a wild-type human IgG hinge region polypeptide. Thus, the isolated polynucleotide molecule codes for a single chain immunoglobulin fusion protein having a binding domain that provides specific binding affinity for a selected antigen.

[0122] The invention also contemplates in certain embodiments binding domain-immunoglobulin fusion proteins as provided herein that comprise fused polypeptide sequences or portions thereof derived from a plurality of genetic sources, for example, according to molecular “domain swapping” paradigms. Those having familiarity with the art will readily appreciate that selection of such polypeptide sequences for assembly into a binding domain-immunoglobulin fusion protein may involve determination of what are appropriate portions of each component polypeptide sequence, based on structural and/or functional properties of each such sequence (see, e.g., Carayannopoulos et al., 1996 J. Exp. Med. 183:1579; Harlow et al., Eds., Antibodies: A Laboratory Manual, Cold Spring Harbor Laboratory, Cold Spring Harbor (1988)). The component polypeptide sequences of which the fusion protein is comprised may therefore comprise intact or full-length binding domain, immunoglobulin, linker and/or plasma membrane anchor domain polypeptide sequences, or truncated versions or variants thereof as provided herein. According to these and related embodiments of the invention, any two or more of the candidate component polypeptides of which the subject invention fusion protein may be comprised will be derived from independent sources, such as from immunoglobulin sequences of differing allotype, isotype, subclass, class, or species of origin (e.g., xenotype). Thus, as a non-limiting example, a binding domain polypeptide (or its constituent polypeptides such as one or more variable region polypeptides and/or a linker polypeptide), a hinge region polypeptide, immunoglobulin heavy chain CH2 and CH3 constant region polypeptides and optionally an immunoglobulin heavy chain CH4 constant region polypeptide as may be obtained from an IgM or IgE heavy chain, and a plasma membrane anchor domain polypeptide may all be separately obtained from distinct genetic sources and engineered into a chimeric or fusion protein using well known techniques and according to methodologies described herein.

[0123] Accordingly, a binding domain-immunoglobulin fusion protein according to certain embodiments of the present invention may also therefore comprise in pertinent part an immunoglobulin heavy chain CH3 constant region polypeptide that is a wild-type IgA CH3 constant region polypeptide, or alternatively, that is a mutated IgA CH3 constant region polypeptide that is incapable of associating with a J chain; preferably the IgA CH3 constant region polypeptides are of human origin. By way of brief background, IgA molecules are known to be released into secretory fluids by a mechanism that involves association of IgA into disulfide-linked polymers (e.g., dimers) via a J chain polypeptide (e.g., GenBank Acc. Nos. XM_{—}059628, M12378, M12759; Johansen et al., 1999 Eur. J. Immunol. 29:1701) and interaction of the complex so formed with another protein that acts as a receptor for polymeric immunoglobulin, and which is known as transmembrane secretory component (S C; Johansen et al., 2000 Sc. J. Immunol. 52:240; see also, e.g., Sorensen et al., 2000 Int. Immunol. 12:19; Yoo et al., 1999 J. Biol. Chem. 274:33771; Yoo et al., 2002 J. Immunol. Meth. 261:1; Corthesy, 2002 Trends Biotechnol. 20:65; Symersky et al., 2000 Mol. Immunol. 37:133; Crottet et al., 1999 Biochem. J. 341:299). Interchain disulfide bond formation between IgA Fc domains and J chain is mediated through a penultimate cysteine residue in an 18-amino acid C-terminal extension that forms part of the IgA heavy chain constant region CH3 domain polypeptide (Yoo et al., 1999; Sorensen et al., 2000). Certain embodiments of the subject invention fusion proteins therefore contemplate inclusion of the wild-type IgA heavy chain constant region polypeptide sequence, which is capable of associating with J chain. Certain other embodiments of the invention, however, contemplate fusion proteins that comprise a mutated IgA CH3 constant region polypeptide that is incapable of associating with a J chain. According to such embodiments, two or more residues from the C-terminus of an IgA CH3 constant region polypeptide such as a human IgA CH3 constant region polypeptide may be deleted to yield a truncated CH3 constant region polypeptide as provided herein. In preferred embodiments and as described in greater detail below, a mutated human IgA CH3 constant region polypeptide that is incapable of associating with a J chain comprises such a C-terminal deletion of either four or 18 amino acids. However, the invention need not be so limited, such that the mutated IgA CH3 constant region polypeptide may comprise a deletion of 2, 3, 4, 5, 6, 7, 8, 9, 10, 11, 12, 13, 14, 15, 16, 17, 18, 19, 20, 21-25, 26-30 or more amino acids, so long as the fusion protein is capable of specifically binding an antigen and of at least one immunological activity as provided herein. Alternatively, the invention also contemplates fusion proteins that comprise a mutated IgA CH3 constant region polypeptide that is incapable of associating with a J chain by virtue of replacement of the penultimate cysteine, or by chemical modification of that amino acid residue, in a manner that prevents interchain disulfide bond formation. Methods for determining whether a fusion protein can associate with a J chain will be known to those having familiarity with the art and are described herein, including in the cited references.

[0124] As also described herein and according to procedures known in the art, the fusion protein may further be tested routinely for immunological activity, for instance, in ADCC or CDC assays. As an illustrative example, a fusion protein according to such an embodiment may comprise a binding domain polypeptide derived from a human heavy chain variable region polypeptide sequence, a human IgA-derived immunoglobulin hinge region polypeptide sequence, a human IgG1 immunoglobulin heavy chain CH2 constant region polypeptide sequence, a human IgG2 immunoglobulin heavy chain CH3 constant region polypeptide sequence, and optionally a human IgE immunoglobulin heavy chain CH4 constant region polypeptide sequence and/or a human TNF-α receptor type 1 (TNFR1) plasma membrane anchor domain polypeptide sequence that comprises a cytoplasmic tail polypeptide which is capable of apoptotic signaling. The invention therefore contemplates these and other embodiments according to the present invention in which two or more polypeptide sequences that are present in a fusion protein have independent genetic origins.

[0125] As noted above, in certain embodiments the binding protein-immunoglobulin fusion protein comprises at least one immunoglobulin variable region polypeptide, which may be a light chain or a heavy chain variable region polypeptide, and in certain embodiments the fusion protein comprises at least one such light chain V-region and one such heavy chain V-region and at least one linker peptide that is fused to each of the V-regions. Construction of such binding domains, for example single chain Fv domains, is well known in the art and is described in greater detail in the Examples below, and has been described, for example, in U.S. Pat. No. 5,892,019 and references cited therein; selection and assembly of single-chain variable regions and of linker polypeptides that may be fused to each of a heavy chain-derived and a light chain-derived V region (e.g., to generate a binding domain that comprises a single-chain Fv polypeptide) is also known to the art and described herein and, for example, in U.S. Pat. No. 5,869,620, U.S. Pat. No. 4,704,692 and U.S. Pat. No. 4,946,778. In certain embodiments all or a portion of an immunoglobulin sequence that is derived from a non-human source may be “humanized” according to recognized procedures for generating humanized antibodies, i.e., immunoglobulin sequences into which human Ig sequences are introduced to reduce the degree to which a human immune system would perceive such proteins as foreign (see, e.g., U.S. Pat. Nos. 5,693,762; 5,585,089; 4,816,567; 5,225,539; 5,530,101; and references cited therein).

[0126] Binding domain-immunoglobulin fusion proteins as described herein may, according to certain embodiments, desirably comprise sites for glycosylation, e.g., covalent attachment of carbohydrate moieties such as monosaccharides or oligosaccharides. Incorporation of amino acid sequences that provide substrates for polypeptide glycosylation is within the scope of the relevant art, including, for example, the use of genetic engineering or protein engineering methodologies to obtain a polypeptide sequence containing the classic Asn-X-Ser/Thr site for N-(asparagine)-linked glycosylation, or a sequence containing Ser or Thr residues that are suitable substrates for O-linked glycosylation, or sequences amenable to C-mannosylation, glypiation/glycosylphosphatidylinositol modification, or phosphoglycation, all of which can be identified according to art-established criteria (e.g., Spiro, 2002 Glybiology 12:43R). Without wishing to be bound by theory, glycosylated fusion proteins having particular amino acid sequences may beneficially possess attributes associated with one or more of improved solubility, enhanced stability in solution, enhanced physiological stability, improved bioavailability including in vivo biodistribution, and superior resistance to proteases, all in a statistically significant manner, relative to fusion proteins having the same or highly similar amino acid sequences but lacking glycosyl moieties. In certain preferred embodiments the subject invention fusion protein comprises a glycosylation site that is present in a linker as provided herein, and in certain other preferred embodiments the subject invention fusion protein comprises a glycosylation site that is present in a hinge region polypeptide sequence as provided herein.

[0127] In certain preferred embodiments of the present invention, the binding domain-immunoglobulin fusion protein is a protein or glycoprotein that is capable of being expressed by a host cell such that it localizes to the cell surface. Binding domain-immunoglobulin fusion proteins that localize to the cell surface may do so by virtue of having naturally present or artificially introduced structural features that direct the fusion protein to the cell surface (e.g., Nelson et al. 2001 Trends Cell Biol. 11:483; Ammon et al., 2002 Arch. Physiol. Biochem. 110:137; Kasai et al., 2001 J. Cell Sci. 114:3115; Watson et al., 2001 Am. J. Physiol. Cell Physiol. 281:C215; Chatterjee et al., 200 J. Biol. Chem. 275:24013) including by way of illustration and not limitation, secretory signal sequences, leader sequences, plasma membrane anchor domain polypeptides such as hydrophobic transmembrane domains (e.g., Heuck et al., 2002 Cell Biochem. Biophys. 36:89; Sadlish et al., 2002 Biochem J. 364:777; Phoenix et al., 2002 Mol. Membr. Biol. 19:1; Minke et al., 2002 Physiol. Rev. 82:429) or glycosylphosphatidylinositol attachment sites (“glypiation” sites, e.g., Chatterjee et al., 2001 Cell Mol. Life Sci. 58:1969; Hooper, 2001 Proteomics 1:748; Spiro, 2002 Glycobiol. 12:43R), cell surface receptor binding domains, extracellular matrix binding domains, or any other structural feature that causes the fusion protein to localize to the cell surface. Particularly preferred are fusion proteins that comprise a plasma membrane anchor domain which includes a transmembrane polypeptide domain, typically comprising a membrane spanning domain which includes a hydrophobic region capable of energetically favorable interaction with the phospholipid fatty acyl tails that form the interior of the plasma membrane bilayer. Such features are well known to those of ordinary skill in the art, who will further be familiar with methods for introducing nucleic acid sequences encoding these features into the subject expression constructs by genetic engineering, and with routine testing of such constructs to verify cell surface localization of the product.

[0128] According to certain further embodiments, a plasma membrane anchor domain polypeptide comprises such a transmembrane domain polypeptide and also comprises a cytoplasmic tail polypeptide, which refers to a region or portion of the polypeptide sequence that contacts the cytoplasmic face of the plasma membrane and/or is in contact with the cytosol or other cytoplasmic components. A large number of cytoplasmic tail polypeptides are known that comprise the intracellular portions of plasma membrane transmembrane proteins, and discrete functions have been identified for many such polypeptides, including biological signal transduction (e.g., activation or inhibition of protein kinases, protein phosphatases, G-proteins, cyclic nucleotides and other second messengers, ion channels, secretory pathways), biologically active mediator release, stable or dynamic association with one or more cytoskeletal components, cellular differentiation, cellular activation, mitogenesis, cytostasis, apoptosis and the like (e.g., Maher et al., 2002 Immunol. Cell Biol. 80:131; El Far et al., 2002 Biochem J. 365:329; Teng et al., 2002 Genome Biol. 2REVIEWS:3012; Simons et al., 2001 Cell Signal 13:855; Furie et al., 2001 Thromb. Haemost. 86:214; Gaffen, 2001 Cytokine 14:63; Dittel, 2000 Arch. Immunol. Ther. Exp. (Warsz.) 48:381; Parnes et al., 2000 Immunol. Rev. 176:75; Moretta et al., 2000 Semin. Immunol. 12:129; Ben Ze'ev, 1999 Ann. N.Y. Acad. Sci. 886:37; Marsters et al., Recent Prog. Horm. Res. 54:225).

[0129] In the context of methods of using binding domain-immunoglobulin fusion proteins for the treatment of a malignant condition or a B-cell disorder as provided herein, the present invention contemplates certain embodiments wherein a binding domain-immunoglobulin fusion protein that comprises a plasma membrane anchor domain polypeptide is expressed at a cell surface and further comprises a cytoplasmic tail polypeptide which comprises an apoptosis signaling polypeptide sequence. A number of apoptosis signaling polypeptide sequences are known to the art, as reviewed, for example, in When Cells Die: A Comprehensive Evaluation of Apoptosis and Programmed Cell Death (R. A. Lockshin et al., Eds., 1998 John Wiley & Sons, New York; see also, e.g., Green et al., 1998 Science 281:1309 and references cited therein; Ferreira et al., 2002 Clin. Canc. Res. 8:2024; Gurumurthy et al., 2001 Cancer Metastas. Rev. 20:225; Kanduc et al., 2002 Int. J. Oncol. 21:165). Typically an apoptosis signaling polypeptide sequence comprises all or a portion of, or is derived from, a receptor death domain polypeptide, for instance, FADD (e.g., Genbank Acc. Nos. U24231, U43184, AF009616, AF009617, NM_{—}012115), TRADD (e.g., Genbank Acc. No. NM_{—}003789), RAIDD (e.g., Genbank Acc. No. U87229), CD95 (FAS/Apo-1; e.g., Genbank Acc. Nos. X89101, NM_{—}003824, AF344850, AF344856), TNF-α-receptor-1 (TNFR1, e.g., Genbank Acc. Nos. S63368, AF040257), DR5 (e.g., Genbank Acc. No. AF020501, AF016268, AF012535), an ITIM domain (e.g., Genbank Acc. Nos. AF081675, BC015731, NM_{—}006840, NM_{—}006844, NM_{—}006847, XM_{—}017977; see, e.g., Billadeau et al., 2002 J. Clin. Invest. 109:161), an ITAM domain (e.g., Genbank Acc. Nos. NM_{—}005843, NM_{—}003473, BC030586; see, e.g., Billadeau et al., 2002), or other apoptosis-associated receptor death domain polypeptides known to the art, for example, TNFR2 (e.g., Genbank Acc. No. L49431, L49432), caspase/procaspase-3 (e.g., Genbank Acc. No. XM_{—}54686), caspase/procaspase-8 (e.g., AF380342, NM_{—}004208, NM_{—}001228, NM_{—}033355, NM_{—}033356, NM_{—}033357, NM_{—}033358), caspase/procaspase-2 (e.g., Genbank Acc. No. AF314174, AF314175), etc.

[0130] Cells in a biological sample that are suspected of undergoing apoptosis may be examined for morphological, permeability or other changes that are indicative of an apoptotic state. For example by way of illustration and not limitation, apoptosis in many cell types may cause altered morphological appearance such as plasma membrane blebbing, cell shape change, loss of substrate adhesion properties or other morphological changes that can be readily detected by a person having ordinary skill in the art, for example by using light microscopy. As another example, cells undergoing apoptosis may exhibit fragmentation and disintegration of chromosomes, which may be apparent by microscopy and/or through the use of DNA-specific or chromatin-specific dyes that are known in the art, including fluorescent dyes. Such cells may also exhibit altered plasma membrane permeability properties as may be readily detected through the use of vital dyes (e.g., propidium iodide, trypan blue) or by the detection of lactate dehydrogenase leakage into the extracellular milieu. These and other means for detecting apoptotic cells by morphologic criteria, altered plasma membrane permeability and related changes will be apparent to those familiar with the art.

[0131] In another embodiment of the invention wherein a binding domain-immunoglobulin fusion protein that is expressed at a cell surface comprises a plasma membrane anchor domain having a transmembrane domain and a cytoplasmic tail that comprises an apoptosis signaling polypeptide, cells in a biological sample may be assayed for translocation of cell membrane phosphatidylserine (PS) from the inner to the outer leaflet of the plasma membrane, which may be detected, for example, by measuring outer leaflet binding by the PS-specific protein annexin. (Martin et al., J. Exp. Med. 182:1545, 1995; Fadok et al., J. Immunol. 148:2207, 1992.) In still other related embodiments of the invention, including embodiments wherein the binding domain-immunoglobulin fusion protein is expressed at the cell surface and comprises a plasma membrane anchor domain having an apoptosis signaling polypeptide and also including embodiments wherein the binding domain-immunoglobulin fusion protein is a soluble protein that lacks a membrane anchor domain and that is capable of inducing apoptosis, a cellular response to an apoptogen is determined by an assay for induction of specific protease activity in any member of a family of apoptosis-activated proteases known as the caspases (see, e.g., Green et al., 1998 Science 281:1309). Those having ordinary skill in the art will be readily familiar with methods for determining caspase activity, for example by determination of caspase-mediated cleavage of specifically recognized protein substrates. These substrates may include, for example, poly-(ADP-ribose) polymerase (PARP) or other naturally occurring or synthetic peptides and proteins cleaved by caspases that are known in the art (see, e.g., Ellerby et al., 1997 J. Neurosci. 17:6165). The synthetic peptide Z-Tyr-Val-Ala-Asp-AFC (SEQ ID NO:______;), wherein “Z” indicates a benzoyl carbonyl moiety and AFC indicates 7-amino-4-trifluoromethylcoumarin (Kluck et al., 1997 Science 275:1132; Nicholson et al., 1995 Nature 376:37), is one such substrate. Other non-limiting examples of substrates include nuclear proteins such as U1-70 kDa and DNA-PKcs (Rosen and Casciola-Rosen, 1997 J. Cell. Biochem. 64:50; Cohen, 1997 Biochem. J. 326:1). Cellular apoptosis may also be detected by determination of cytochrome c that has escaped from mitochondria in apoptotic cells (e.g., Liu et al., Cell 86:147, 1996). Such detection of cytochrome c may be performed spectrophotometrically, immunochemically or by other well established methods for determining the presence of a specific protein. Persons having ordinary skill in the art will readily appreciate that there may be other suitable techniques for quantifying apoptosis.

[0132] Once a binding domain-immunoglobulin fusion protein as provided herein has been designed, DNAs encoding the polypeptide may be synthesized via oligonucleotide synthesis as described, for example, in Sinha et al., Nucleic Acids Res., 12, 4539-4557 (1984); assembled via PCR as described, for example in Innis, Ed., PCR Protocols, Academic Press (1990) and also in Better et al. J. Biol. Chem. 267, 16712-16118 (1992); cloned and expressed via standard procedures as described, for example, in Ausubel et al., Eds., Current Protocols in Molecular Biology, John Wiley & Sons, New York (1989) and also in Robinson et al., Hum. Antibod. Hybridomas, 2, 84-93 (1991); and tested for specific antigen binding activity, as described, for example, in Harlow et al., Eds., Antibodies: A Laboratory Manual, Chapter 14, Cold Spring Harbor Laboratory, Cold Spring Harbor (1988) and Munson et al., Anal. Biochem., 107, 220-239 (1980).

[0133] The preparation of single polypeptide chain binding molecules of the Fv region, single-chain Fv molecules, is described in U.S. Pat. No. 4,946,778, which is incorporated herein by reference. In the present invention, single-chain Fv-like molecules are synthesized by encoding a first variable region of the heavy or light chain, followed by one or more linkers to the variable region of the corresponding light or heavy chain, respectively. The selection of appropriate linker(s) between the two variable regions is described in U.S. Pat. No. 4,946,778 (see also, e.g., Huston et al., 1993 Int. Rev. Immunol. 10:195). An exemplary linker described herein is (Gly-Gly-Gly-Gly-Ser)₃. The linker is used to convert the naturally aggregated but chemically separate heavy and light chains into the amino terminal antigen binding portion of a single polypeptide chain, wherein this antigen binding portion will fold into a structure similar to the original structure made of two polypeptide chains and thus retain the ability to bind to the antigen of interest. The nucleotide sequences encoding the variable regions of the heavy and light chains, joined by a sequence encoding a linker, are joined to a nucleotide sequence encoding antibody constant regions. The constant regions are those which permit the resulting polypeptide to form interchain disulfide bonds to form a dimer, and which contain desired effector functions, such as the ability to mediate antibody-dependent cellular cytotoxicity (ADCC). For an immunoglobulin-like molecule of the invention which is intended for use in humans, the constant regions will typically be substantially human to minimize a potential anti-human immune response and to provide appropriate effector functions. Manipulation of sequences encoding antibody constant regions is described in the PCT publication of Morrison and Oi, WO 89/07142, which is incorporated herein by reference. In preferred embodiments, the CH1 domain is deleted and the carboxyl end of the binding domain polypeptide (e.g., an immunoglobulin variable region polypeptide) is joined to the amino terminus of CH2 via a hinge region polypeptide as provided herein.

[0134] As described above, the present invention provides recombinant expression constructs capable of directing the expression of binding domain-immunoglobulin fusion proteins as provided herein. The amino acids, which occur in the various amino acid sequences referred to herein, are identified according to their well known three-letter or single-letter abbreviations. The nucleotides, which occur in the various DNA sequences or fragments thereof referred herein, are designated with the standard single letter designations used routinely in the art. A given amino acid sequence may also encompass similar amino acid sequences having only minor changes, for example by way of illustration and not limitation, covalent chemical modifications, insertions, deletions and substitutions, which may further include conservative substitutions. Amino acid sequences that are similar to one another may share substantial regions of sequence homology. In like fashion, nucleotide sequences may encompass substantially similar nucleotide sequences having only minor changes, for example by way of illustration and not limitation, covalent chemical modifications, insertions, deletions and substitutions, which may further include silent mutations owing to degeneracy of the genetic code. Nucleotide sequences that are similar to one another may share substantial regions of sequence homology.

[0135] The presence of a malignant condition in a subject refers to the presence of dysplastic, cancerous and/or transformed cells in the subject, including, for example neoplastic, tumor, non-contact inhibited or oncogenically transformed cells, or the like (e.g., melanoma, carcinomas such as adenocarcinoma, squamous cell carcinoma, small cell carcinoma, oat cell carcinoma, etc., sarcomas such as chondrosarcoma, osteosarcoma, etc.) which are known to the art and for which criteria for diagnosis and classification are established. In preferred embodiments contemplated by the present invention, for example, such cancer cells are malignant hematopoietic cells, such as transformed cells of lymphoid lineage and in particular, B-cell lymphomas and the like; cancer cells may in certain preferred embodiments also be epithelial cells such as carcinoma cells. The invention also contemplates B-cell disorders, which may include certain malignant conditions that affect B-cells (e.g., B-cell lymphoma) but which is not intended to be so limited, and which is also intended to encompass autoimmune diseases and in particular, diseases, disorders and conditions that are characterized by autoantibody production.

[0136] Autoantibodies are antibodies that react with self antigens. Autoantibodies are detected in several autoimmune diseases (i.e., a disease, disorder or condition wherein a host immune system generates an inappropriate anti-“self” immune reaction) where they are involved in disease activity. The current treatments for these autoimmune diseases are immunosuppressive drugs that require continuing administration, lack specificity, and cause significant side effects. New approaches that can eliminate autoantibody production with minimal toxicity will address an unmet medical need for a spectrum of diseases that affect many people. The subject invention binding domain-immunoglobulin fusion protein is designed for improved penetration into lymphoid tissues. Depletion of B lymphocytes interrupts the autoantibody production cycle, and allows the immune system to reset as new B lymphocytes are produced from precursors in the bone marrow.

[0137] A number of diseases have been identified for which beneficial effects are believed, according to non-limiting theory, to result from B cell depletion therapy; a brief description of several exemplars of these diseases follows.

[0138] Autoimmune thyroid disease includes Graves' disease and Hashimoto's thyroiditis. In the United States alone, there are about 20 million people who have some form of autoimmune thyroid disease. Autoimmune thyroid disease results from the production of autoantibodies that either stimulate the thyroid to cause hyperthyroidism (Graves' disease) or destroy the thyroid to cause hypothyroidism (Hashimoto's thyroiditis). Stimulation of the thyroid is caused by autoantibodies that bind and activate the thyroid stimulating hormone (TSH) receptor. Destruction of the thyroid is caused by autoantibodies that react with other thyroid antigens.

[0139] Current therapy for Graves' disease includes surgery, radioactive iodine, or antithyroid drug therapy. Radioactive iodine is widely used, since antithyroid medications have significant side effects and disease recurrence is high. Surgery is reserved for patients with large goiters or where there is a need for very rapid normalization of thyroid function. There are no therapies that target the production of autoantibodies responsible for stimulating the TSH receptor. Current therapy for Hashimoto's thyroiditis is levothyroxine sodium, and therapy is usually lifelong because of the low likelihood of remission. Suppressive therapy has been shown to shrink goiters in Hashimoto's thryoiditis, but no therapies that reduce autoantibody production to target the disease mechanism are known.

[0140] Rheumatoid arthritis (RA) is a chronic disease characterized by inflamation of the joints, leading to swelling, pain, and loss of function. RA effects an estimated 2.5 million people in the United States. RA is caused by a combination of events including an initial infection or injury, an abnormal immune response, and genetic factors. While autoreactive T cells and B cells are present in RA, the detection of high levels of antibodies that collect in the joints, called rheumatoid factor, is used in the diagnosis of RA. Current therapy for RA includes many medications for managing pain and slowing the progression of the disease. No therapy has been found that can cure the disease. Medications include nonsteroidal antiinflamatory drugs (NSAIDS), and disease modifying antirheumatic drugs (DMARDS). NSAIDS are effective in benign disease, but fail to prevent the progression to joint destruction and debility in severe RA. Both NSAIDS and DMARDS are associated with significant side effects. Only one new DMARD, Leflunomide, has been approved in over 10 years. Leflunomide blocks production of autoantibodies, reduces inflamation, and slows progression of RA. However, this drug also causes severe side effects including nausea, diarrhea, hair loss, rash, and liver injury.

[0141] Systemic Lupus Erythematosus (SLE) is an autoimmune disease caused by recurrent injuries to blood vessels in multiple organs, including the kidney, skin, and joints. SLE effects over 500,000 people in the United States. In patients with SLE, a faulty interaction between T cells and B cells results in the production of autoantibodies that attack the cell nucleus. These include anti-double stranded DNA and anti-Sm antibodies. Autoantibodies that bind phospholipids are also found in about half of SLE patients, and are responsible for blood vessel damage and low blood counts. Immune complexes accumulate the kidneys, blood vessels, and joints of SLE patients, where they cause inflamation and tissue damage. No treatment for SLE has been found to cure the disease. NSAIDS and DMARDS are used for therapy depending upon the severity of the disease. Plasmapheresis with plasma exchange to remove autoantibodies can cause temporary improvement in SLE patients. There is general agreement that autoantibodies are responsible for SLE, so new therapies that deplete the B cell lineage, allowing the immune system to reset as new B cells are generated from precursors, offer hope for long lasting benefit in SLE patients.

[0142] Sjogrens syndrome is an autoimmune disease characterized by destruction of the body's moisture producing glands. Sjogrens syndrome is one of the most prevelant autoimmune disorders, striking up to 4 million people in the United States. About half of people with Sjogren's also have a connective tissue disease, such as rheumatoid arthritis, while the other half have primary Sjogren's with no other concurrent autoimmune disease. Autoantibodies, including anti-nuclear antibodies, rheumatoid factor, anti-fodrin, and anti-muscarinic receptor are often present in patients with Sjogrens syndrome. Conventional therapy includes corticosteroids.

[0143] Immune Thrombocytopenic purpura (ITP) is caused by autoantibodies that bind to blood platelets and cause their destruction. Some cases of ITP are caused by drugs, and others are associated with infection, pregnancy, or autoimmune disease such as SLE. About half of all cases are classified as “idiopathic”, meaning the cause is unknown. The treatment of ITP is determined by the severity of the symptoms. In some cases, no therapy is needed. In most cases, immunosuppressive drugs, including corticosteroids or intravenous infusions of immune globulin to deplete T cells. Another treatment that usually results in an increased number of platelets is removal of the spleen, the organ that destroys antibody-coated platelets. More potent immunosuppressive drugs, including cyclosporine, cyclophosphamide, or azathioprine are used for patients with severe cases. Removal of autoantibodies by passage of patients' plasma over a Protein A column is used as a second line treatment in patients with severe disease.

[0144] Multiple Sclerosis (MS) is an autoimmune disease characterized by inflamation of the central nervous system and destruction of myelin, which insulates nerve cell fibers in the brain, spinal cord, and body. Although the cause of MS is unknown, it is widely believed that autoimmune T cells are primary contributors to the pathogenesis of the disease. However, high levels of antibodies are present in the cerebral spinal fluid of patients with MS, and some theories predict that the B cell response leading to antibody production is important for mediating the disease. No B cell depletion therapies have been studies in patients with MS. There is no cure for MS. Current therapy is corticosteroids, which can reduce the duration and severity of attacks, but do not affect the course of MS over time. New biotechnology interferon (IFN) therapies for MS have recently been approved.

[0145] Myasthenia Gravis (MG) is a chronic autoimmune neuromuscular disorder that is characterized by weakness of the voluntary muscle groups. MG effects about 40,000 people in the United States. MG is caused by autoantibodies that bind to acetylcholine receptors expressed at neuromuscular junctions. The autoantibodies reduce or block acetylcholine receptors, preventing the transmission of signals from nerves to muscles. There is no known cure for MG. Common treatments include immunosuppression with corticosteroids, cyclosporine, cyclophosphamide, or azathioprine. Surgical removal of the thymus is often used to blunt the autoimmune response. Plasmapheresis, used to reduce autoantibody levels in the blood, is effective in MG, but is short-lived because the production of autoantibodies continues. Plasmapheresis is usually reserved for severe muscle weakness prior to surgery.

[0146] Psoriasis effects approximately five million people. Autoimmune inflamation in the skin. Psoriasis associated with arthritis in 30% (psoriatic arthritis). Many treatments, including steroids, UV light retenoids, vitamin D derivatives, cyclosporine, methotrexate.

[0147] Scleroderma is a chronic autoimmune disease of the connective tissue that is also known as systemic sclerosis. Scleroderma is characterized by an overproduction of collagen, resulting in a thickening of the skin. Approximately 300,000 people in the United States have scleroderma.

[0148] Inflamatory Bowel Disease including Crohn's disease and Ulcerative colitis, are autoimmune diseases of the digestive system.

[0149] The present invention further relates to constructs encoding binding domain-immunoglobulin fusion proteins, and in particular to methods for administering recombinant constructs encoding such proteins that may be expressed, for example, as fragments, analogs and derivatives of such polypeptides. The terms “fragment,” “derivative” and “analog” when referring to binding domain-immunoglobulin fusion polypeptides or fusion proteins, refers to any binding domain-immunoglobulin fusion polypeptide or fusion protein that retains essentially the same biological function or activity as such polypeptide. Thus, an analog includes a proprotein which can be activated by cleavage of the proprotein portion to produce an active binding domain-immunoglobulin fusion polypeptide.

[0150] A fragment, derivative or analog of an binding domain-immunoglobulin fusion polypeptide or fusion protein, including binding domain-immunoglobulin fusion polypeptides or fusion proteins encoded by the cDNAs referred to herein, may be (i) one in which one or more of the amino acid residues are substituted with a conserved or non-conserved amino acid residue (preferably a conserved amino acid residue) and such substituted amino acid residue may or may not be one encoded by the genetic code, or (ii) one in which one or more of the amino acid residues includes a substituent group, or (iii) one in which additional amino acids are fused to the binding domain-immunoglobulin fusion polypeptide, including amino acids that are employed for detection or specific functional alteration of the binding domain-immunoglobulin fusion polypeptide or a proprotein sequence. Such fragments, derivatives and analogs are deemed to be within the scope of those skilled in the art from the teachings herein.

[0151] The polypeptides of the present invention include binding domain-immunoglobulin fusion polypeptides and fusion proteins having binding domain polypeptide amino acid sequences that are identical or similar to sequences known in the art, or fragments or portions thereof. For example by way of illustration and not limitation, a human CD154 molecule extracellular domain [SEQ ID NO:______] is contemplated for use according to the instant invention, as are polypeptides having at least 70% similarity (preferably a 70% identity) and more preferably 90% similarity (more preferably a 90% identity) to the reported polypeptide and still more preferably a 95% similarity (still more preferably a 95% identity) to the reported polypeptides and to portions of such polypeptides, wherein such portions of a binding domain-immunoglobulin fusion polypeptide generally contain at least 30 amino acids and more preferably at least 50 amino acids. Extracellular domains include portions of a cell surface molecule, and in particularly preferred embodiments cell surface molecules that are integral membrane proteins or that comprise a plasma membrane spanning transmembrane domain, that extend beyond the outer leaflet of the plasma membrane phospholipid bilayer when the molecule is expressed at a cell surface, preferably in a manner that exposes the extracellular domain portion of such a molecule to the external environment of the cell, also known as the extracellular milieu. Methods for determining whether a portion of a cell surface molecule comprises an extracellular domain are well known to the art and include experimental determination (e.g., direct or indirect labeling of the molecule, evaluation of whether the molecule can be structurally altered by agents to which the plasma membrane is not permeable such as proteolytic or lipolytic enzymes) or topological prediction based on the structure of the molecule (e.g., analysis of the amino acid sequence of a polypeptide) or other methodologies.

[0152] As known in the art “similarity” between two polypeptides is determined by comparing the amino acid sequence and conserved amino acid substitutes thereto of the polypeptide to the sequence of a second polypeptide. Fragments or portions of the nucleic acids encoding polypeptides of the present invention may be used to synthesize full-length nucleic acids of the present invention. As used herein, “% identity” refers to the percentage of identical amino acids situated at corresponding amino acid residue positions when two or more polypeptide are aligned and their sequences analyzed using a gapped BLAST algorithm (e.g., Altschul et al., 1997 Nucl. Ac. Res. 25:3389) which weights sequence gaps and sequence mismatches according to the default weightings provided by the National Institutes of Health/NCBI database (Bethesda, Md; see www.ncbi.nlm.nih.gov/cgi-bin/BLAST/nph-newblast).

[0153] The term “isolated” means that the material is removed from its original environment (e.g., the natural environment if it is naturally occurring). For example, a naturally occurring nucleic acid or polypeptide present in a living animal is not isolated, but the same nucleic acid or polypeptide, separated from some or all of the co-existing materials in the natural system, is isolated. Such nucleic acids could be part of a vector and/or such nucleic acids or polypeptides could be part of a composition, and still be isolated in that such vector or composition is not part of its natural environment.

[0154] The term “gene” means the segment of DNA involved in producing a polypeptide chain; it includes regions preceding and following the coding region “leader and trailer” as well as intervening sequences (introns) between individual coding segments (exons).

[0155] As described herein, the invention provides binding domain-immunoglobulin fusion proteins encoded by nucleic acids that have the binding domain coding sequence fused in frame to an additional immunoglobulin domain encoding sequence to provide for expression of a binding domain polypeptide sequence fused to an additional functional polypeptide sequence that permits, for example by way of illustration and not limitation, detection, functional alteration, isolation and/or purification of the fusion protein. Such fusion proteins may permit functional alteration of a binding domain by containing additional immunoglobulin-derived polypeptide sequences that influence behavior of the fusion product, for example (and as described above) by reducing the availability of sulfhydryl groups for participation in disulfide bond formation, and by conferring the ability to potentiate ADCC and/or CDC.

[0156] Modification of the polypeptide may be effected by any means known to those of skill in this art. The preferred methods herein rely on modification of DNA encoding the fusion protein and expression of the modified DNA. DNA encoding one of the binding domain-immunoglobulin fusions discussed above may be mutagenized using standard methodologies, including those described below. For example, cysteine residues that may otherwise facilitate multimer formation or promote particular molecular conformations can be deleted from a polypeptide or replaced, e.g., cysteine residues that are responsible for aggregate formation. If necessary, the identity of cysteine residues that contribute to aggregate formation may be determined empirically, by deleting and/or replacing a cysteine residue and ascertaining whether the resulting protein aggregates in solutions containing physiologically acceptable buffers and salts. In addition, fragments of binding domain-immunoglobulin fusions may be constructed and used. As noted above, the counterreceptor/ligand binding domains for many candidate binding domain-immunoglobulin fusion have been delineated, such that one having ordinary skill in the art may readily select appropriate polypeptide domains for inclusion in the encoded products of the instant expression constructs.

[0157] Conservative substitutions of amino acids are well-known and may be made generally without altering the biological activity of the resulting binding domain-immunoglobulin fusion protein molecule. For example, such substitutions are generally made by interchanging within the groups of polar residues, charged residues, hydrophobic residues, small residues, and the like. If necessary, such substitutions may be determined empirically merely by testing the resulting modified protein for the ability to bind to the appropriate cell surface receptors in in vitro biological assays, or to bind to appropriate antigens or desired target molecules.

[0158] The present invention further relates to nucleic acids which hybridize to binding domain-immunoglobulin fusion protein encoding polynucleotide sequences as provided herein, or their complements, as will be readily apparent to those familiar with the art, if there is at least 70%, preferably 80-85%, more preferably at least 90%, and still more preferably at least 95%, 96%, 97%, 98% or 99% identity between the sequences. The present invention particularly relates to nucleic acids which hybridize under stringent conditions to the binding domain-immunoglobulin fusion encoding nucleic acids referred to herein. As used herein, the term “stringent conditions” means hybridization will occur only if there is at least 90-95% and preferably at least 97% identity between the sequences. The nucleic acids which hybridize to binding domain-immunoglobulin fusion encoding nucleic acids referred to herein, in preferred embodiments, encode polypeptides which retain substantially the same biological function or activity as the binding domain-immunoglobulin fusion polypeptides encoded by the cDNAs of the references cited herein.

[0159] As used herein, to “hybridize” under conditions of a specified stringency is used to describe the stability of hybrids formed between two single-stranded nucleic acid molecules. Stringency of hybridization is typically expressed in conditions of ionic strength and temperature at which such hybrids are annealed and washed. Typically “high”, “medium” and “low” stringency encompass the following conditions or equivalent conditions thereto: high stringency: 0.1×SSPE or SSC, 0.1% SDS, 65° C.; medium stringency: 0.2×SSPE or SSC, 0.1% SDS, 50° C.; and low stringency: 1.0×SSPE or SSC, 0.1% SDS, 50° C. As known to those having ordinary skill in the art, variations in stringency of hybridization conditions may be achieved by altering the time, temperature and/or concentration of the solutions used for prehybridization, hybridization and wash steps, and suitable conditions may also depend in part on the particular nucleotide sequences of the probe used, and of the blotted, proband nucleic acid sample. Accordingly, it will be appreciated that suitably stringent conditions can be readily selected without undue experimentation where a desired selectivity of the probe is identified, based on its ability to hybridize to one or more certain proband sequences while not hybridizing to certain other proband sequences.

[0160] The nucleic acids of the present invention, also referred to herein as polynucleotides, may be in the form of RNA or in the form of DNA, which DNA includes cDNA, genomic DNA, and synthetic DNA. The DNA may be double-stranded or single-stranded, and if single stranded may be the coding strand or non-coding (anti-sense) strand. A coding sequence which encodes an binding domain-immunoglobulin fusion polypeptide for use according to the invention may be identical to the coding sequence known in the art for any given binding domain-immunoglobulin fusion, or may be a different coding sequence, which, as a result of the redundancy or degeneracy of the genetic code, encodes the same binding domain-immunoglobulin fusion polypeptide.

[0161] The nucleic acids which encode binding domain-immunoglobulin fusion polypeptides for use according to the invention may include, but are not limited to: only the coding sequence for the binding domain-immunoglobulin fusion polypeptide; the coding sequence for the binding domain-immunoglobulin fusion polypeptide and additional coding sequence; the coding sequence for the binding domain-immunoglobulin fusion polypeptide (and optionally additional coding sequence) and non-coding sequence, such as introns or non-coding sequences 5′ and/or 3′ of the coding sequence for the binding domain-immunoglobulin fusion polypeptide, which for example may further include but need not be limited to one or more regulatory nucleic acid sequences that may be a regulated or regulatable promoter, enhancer, other transcription regulatory sequence, repressor binding sequence, translation regulatory sequence or any other regulatory nucleic acid sequence. Thus, the term “nucleic acid encoding” or “polynucleotide encoding” a binding domain-immunoglobulin fusion protein encompasses a nucleic acid which includes only coding sequence for a binding domain-immunoglobulin fusion polypeptide as well as a nucleic acid which includes additional coding and/or non-coding sequence(s).

[0162] Nucleic acids and oligonucleotides for use as described herein can be synthesized by any method known to those of skill in this art (see, e.g., WO 93/01286, U.S. application Ser. No. 07/723,454; U.S. Pat. No. 5,218,088; U.S. Pat. No. 5,175,269; U.S. Pat. No. 5,109,124). Identification of oligonucleotides and nucleic acid sequences for use in the present invention involves methods well known in the art. For example, the desirable properties, lengths and other characteristics of useful oligonucleotides are well known. In certain embodiments, synthetic oligonucleotides and nucleic acid sequences may be designed that resist degradation by endogenous host cell nucleolytic enzymes by containing such linkages as: phosphorothioate, methylphosphonate, sulfone, sulfate, ketyl, phosphorodithioate, phosphoramidate, phosphate esters, and other such linkages that have proven useful in antisense applications (see, e.g., Agrwal et al., Tetrehedron Lett. 28:3539-3542 (1987); Miller et al., J. Am. Chem. Soc. 93:6657-6665 (1971); Stec et al., Tetrehedron Lett. 26:2191-2194 (1985); Moody et al., Nucl. Acids Res. 12:4769-4782 (1989); Uznanski et al., Nucl. Acids Res. (1989); Letsinger et al., Tetrahedron 40:137-143 (1984); Eckstein, Annu. Rev. Biochem. 54:367-402 (1985); Eckstein, Trends Biol. Sci. 14:97-100 (1989); Stein In: Oligodeoxynucleotides. Antisense Inhibitors of Gene Expression, Cohen, Ed, Macmillan Press, London, pp. 97-117 (1989); Jager et al., Biochemistry 27:7237-7246 (1988)).

[0163] In one embodiment, the present invention provides truncated components (e.g., binding domain polypeptide, hinge region polypeptide, linker, etc.) for use in a binding domain-immunoglobulin fusion protein, and in another embodiment the invention provides nucleic acids encoding a binding domain-immunoglobulin fusion protein having such truncated components. A truncated molecule may be any molecule that comprises less than a full length version of the molecule. Truncated molecules provided by the present invention may include truncated biological polymers, and in preferred embodiments of the invention such truncated molecules may be truncated nucleic acid molecules or truncated polypeptides. Truncated nucleic acid molecules have less than the full length nucleotide sequence of a known or described nucleic acid molecule, where such a known or described nucleic acid molecule may be a naturally occurring, a synthetic or a recombinant nucleic acid molecule, so long as one skilled in the art would regard it as a full length molecule. Thus, for example, truncated nucleic acid molecules that correspond to a gene sequence contain less than the full length gene where the gene comprises coding and non-coding sequences, promoters, enhancers and other regulatory sequences, flanking sequences and the like, and other functional and non-functional sequences that are recognized as part of the gene. In another example, truncated nucleic acid molecules that correspond to a mRNA sequence contain less than the full length mRNA transcript, which may include various translated and non-translated regions as well as other functional and non-functional sequences.

[0164] In other preferred embodiments, truncated molecules are polypeptides that comprise less than the full length amino acid sequence of a particular protein or polypeptide component. As used herein “deletion” has its common meaning as understood by those familiar with the art, and may refer to molecules that lack one or more of a portion of a sequence from either terminus or from a non-terminal region, relative to a corresponding full length molecule, for example, as in the case of truncated molecules provided herein. Truncated molecules that are linear biological polymers such as nucleic acid molecules or polypeptides may have one or more of a deletion from either terminus of the molecule or a deletion from a non-terminal region of the molecule, where such deletions may be deletions of 1-1500 contiguous nucleotide or amino acid residues, preferably 1-500 contiguous nucleotide or amino acid residues and more preferably 1-300 contiguous nucleotide or amino acid residues, including deletions of 1, 2, 3, 4, 5, 6, 7, 8, 9, 10, 11, 12, 13, 14, 15, 16, 17, 18, 19, 20, 21, 22, 23, 24, 25, 26, 27, 28, 29, 30, 31-40, 41-50, 51-74, 75-100, 101-150, 151-200, 201-250 or 251-299 contiguous nucleotide or amino acid residues. In certain particularly preferred embodiments truncated nucleic acid molecules may have a deletion of 270-330 contiguous nucleotides. In certain other particularly preferred embodiments truncated polypeptide molecules may have a deletion of 80-140 contiguous amino acids.

[0165] The present invention further relates to variants of the herein referenced nucleic acids which encode fragments, analogs and/or derivatives of a binding domain-immunoglobulin fusion polypeptide. The variants of the nucleic acids encoding binding domain-immunoglobulin fusion may be naturally occurring allelic variants of the nucleic acids or non-naturally occurring variants. As is known in the art, an allelic variant is an alternate form of a nucleic acid sequence which may have at least one of a substitution, a deletion or an addition of one or more nucleotides, any of which does not substantially alter the function of the encoded binding domain-immunoglobulin fusion polypeptide.

[0166] Variants and derivatives of binding domain-immunoglobulin fusion may be obtained by mutations of nucleotide sequences encoding binding domain-immunoglobulin fusion polypeptides or any portion thereof. Alterations of the native amino acid sequence may be accomplished by any of a number of conventional methods. Mutations can be introduced at particular loci by synthesizing oligonucleotides containing a mutant sequence, flanked by restriction sites enabling ligation to fragments of the native sequence. Following ligation, the resulting reconstructed sequence encodes an analog having the desired amino acid insertion, substitution, or deletion.

[0167] Alternatively, oligonucleotide-directed site-specific mutagenesis procedures can be employed to provide an altered gene wherein predetermined codons can be altered by substitution, deletion or insertion. Exemplary methods of making such alterations are disclosed by Walder et al. (Gene 42:133, 1986); Bauer et al. (Gene 37:73, 1985); Craik (BioTechniques, Jan. 12-19, 1985); Smith et al. (Genetic Engineering: Principles and Methods BioTechniques, Jan. 12-19, 1985); Smith et al. (Genetic Engineering: Principles and Methods, Plenum Press, 1981); Kunkel (Proc. Natl. Acad. Sci. USA 82:488, 1985); Kunkel et al. (Methods in Enzymol. 154:367, 1987); and U.S. Pat. Nos. 4,518,584 and 4,737,462.

[0168] As an example, modification of DNA may be performed by site-directed mutagenesis of DNA encoding the protein combined with the use of DNA amplification methods using primers to introduce and amplify alterations in the DNA template, such as PCR splicing by overlap extension (SOE). Site-directed mutagenesis is typically effected using a phage vector that has single- and double-stranded forms, such as M13 phage vectors, which are well-known and commercially available. Other suitable vectors that contain a single-stranded phage origin of replication may be used (see, e.g., Veira et al., Meth. Enzymol. 15:3, 1987). In general, site-directed mutagenesis is performed by preparing a single-stranded vector that encodes the protein of interest (e.g., all or a component portion of a given binding domain-immunoglobulin fusion protein). An oligonucleotide primer that contains the desired mutation within a region of homology to the DNA in the single-stranded vector is annealed to the vector followed by addition of a DNA polymerase, such as E. coli DNA polymerase I (Klenow fragment), which uses the double stranded region as a primer to produce a heteroduplex in which one strand encodes the altered sequence and the other the original sequence. The heteroduplex is introduced into appropriate bacterial cells and clones that include the desired mutation are selected. The resulting altered DNA molecules may be expressed recombinantly in appropriate host cells to produce the modified protein.

[0169] Equivalent DNA constructs that encode various additions or substitutions of amino acid residues or sequences, or deletions of terminal or internal residues or sequences not needed for biological activity are also encompassed by the invention. For example, and as discussed above, sequences encoding Cys residues that are not desirable or essential for biological activity can be altered to cause the Cys residues to be deleted or replaced with other amino acids, preventing formation of incorrect intramolecular disulfide bridges upon renaturation.

[0170] Host organisms include those organisms in which recombinant production of binding domain-immunoglobulin fusion products encoded by the recombinant constructs of the present invention may occur, such as bacteria (for example, E. coli), yeast (for example, Saccharomyces cerevisiae and Pichia pastoris), insect cells and mammals, including in vitro and in vivo expression. Host organisms thus may include organisms for the construction, propagation, expression or other steps in the production of the compositions provided herein; hosts also include subjects in which immune responses take place, as described above. Presently preferred host organisms are E. coli bacterial strains, inbred murine strains and murine cell lines, and human cells, subjects and cell lines.

[0171] The DNA construct encoding the desired binding domain-immunoglobulin fusion is introduced into a plasmid for expression in an appropriate host. In preferred embodiments, the host is a bacterial host. The sequence encoding the ligand or nucleic acid binding domain is preferably codon-optimized for expression in the particular host. Thus, for example, if a human binding domain-immunoglobulin fusion is expressed in bacteria, the codons would be optimized for bacterial usage. For small coding regions, the gene can be synthesized as a single oligonucleotide. For larger proteins, splicing of multiple oligonucleotides, mutagenesis, or other techniques known to those in the art may be used. The sequences of nucleotides in the plasmids that are regulatory regions, such as promoters and operators, are operationally associated with one another for transcription. The sequence of nucleotides encoding a binding domain-immunoglobulin fusion protein may also include DNA encoding a secretion signal, whereby the resulting peptide is a precursor protein. The resulting processed protein may be recovered from the periplasmic space or the fermentation medium.

[0172] In preferred embodiments, the DNA plasmids also include a transcription terminator sequence. As used herein, a “transcription terminator region” is a sequence that signals transcription termination. The entire transcription terminator may be obtained from a protein-encoding gene, which may be the same or different from the inserted binding domain-immunoglobulin fusion encoding gene or the source of the promoter. Transcription terminators are optional components of the expression systems herein, but are employed in preferred embodiments.

[0173] The plasmids used herein include a promoter in operative association with the DNA encoding the protein or polypeptide of interest and are designed for expression of proteins in a suitable host as described above (e.g., bacterial, murine or human) depending upon the desired use of the plasmid (e.g., administration of a vaccine containing binding domain-immunoglobulin fusion encoding sequences). Suitable promoters for expression of proteins and polypeptides herein are widely available and are well known in the art. Inducible promoters or constitutive promoters that are linked to regulatory regions are preferred. Such promoters include, but are not limited to, the T7 phage promoter and other T7-like phage promoters, such as the T3, T5 and SP6 promoters, the trp, lpp, and lac promoters, such as the lacUV5, from E. coli; the P10 or polyhedrin gene promoter of baculovirus/insect cell expression systems (see, e.g., U.S. Pat. Nos. 5,243,041, 5,242,687, 5,266,317, 4,745,051, and 5,169,784) and inducible promoters from other eukaryotic expression systems. For expression of the proteins such promoters are inserted in a plasmid in operative linkage with a control region such as the lac operon.

[0174] Preferred promoter regions are those that are inducible and functional in E. coli. Examples of suitable inducible promoters and promoter regions include, but are not limited to: the E. coli lac operator responsive to isopropyl β-D-thiogalactopyranoside (IPTG; see Nakamura et al., Cell 18:1109-1117, 1979); the metallothionein promoter metal-regulatory-elements responsive to heavy-metal (e.g., zinc) induction (see, e.g., U.S. Pat. No. 4,870,009 to Evans et al.); the phage T7lac promoter responsive to IPTG (see, e.g., U.S. Pat. No. 4,952,496; and Studier et al., Meth. Enzymol. 185:60-89, 1990) and the TAC promoter.

[0175] The plasmids may optionally include a selectable marker gene or genes that are functional in the host. A selectable marker gene includes any gene that confers a phenotype on bacteria that allows transformed bacterial cells to be identified and selectively grown from among a vast majority of untransformed cells. Suitable selectable marker genes for bacterial hosts, for example, include the ampicillin resistance gene (Amp^{r}), tetracycline resistance gene (Tc^{r}) and the kanamycin resistance gene (Kan^{r}). The kanamycin resistance gene is presently preferred.

[0176] The plasmids may also include DNA encoding a signal for secretion of the operably linked protein. Secretion signals suitable for use are widely available and are well known in the art. Prokaryotic and eukaryotic secretion signals functional in E. coli may be employed. The presently preferred secretion signals include, but are not limited to, those encoded by the following E. coli genes: ompA, ompT, ompF, ompC, beta-lactamase, and alkaline phosphatase, and the like (von Heijne, J. Mol. Biol 184:99-105, 1985). In addition, the bacterial pelB gene secretion signal (Lei et al., J. Bacteriol. 169:4379, 1987), the phoA secretion signal, and the cek2 functional in insect cell may be employed. The most preferred secretion signal is the E. coli ompA secretion signal. Other prokaryotic and eukaryotic secretion signals known to those of skill in the art may also be employed (see, e.g., von Heijne, J. Mol. Biol. 184:99-105, 1985). Using the methods described herein, one of skill in the art can substitute secretion signals that are functional in either yeast, insect or mammalian cells to secrete proteins from those cells.

[0177] Preferred plasmids for transformation of E. coli cells include the pET expression vectors (e.g., pET-11a, pET-12a-c, pET-15b; see U.S. Pat. No. 4,952,496; available from Novagen, Madison, Wis.). Other preferred plasmids include the pKK plasmids, particularly pKK 223-3, which contains the tac promoter (Brosius et al., Proc. Natl. Acad. Sci. 81:6929, 1984; Ausubel et al., Current Protocols in Molecular Biology; U.S. Pat. Nos. 5,122,463, 5,173,403, 5,187,153, 5,204,254, 5,212,058, 5,212,286, 5,215,907, 5,220,013, 5,223,483, and 5,229,279). Plasmid pKK has been modified by replacement of the ampicillin resistance gene with a kanamycin resistance gene. (Available from Pharmacia; obtained from pUC4K, see, e.g., Vieira et al. (Gene 19:259-268, 1982; and U.S. Pat. No. 4,719,179.) Baculovirus vectors, such as pBlueBac (also called pJVETL and derivatives thereof), particularly pBlueBac III (see, e.g., U.S. Pat. Nos. 5,278,050, 5,244,805, 5,243,041, 5,242,687, 5,266,317, 4,745,051, and 5,169,784; available from Invitrogen, San Diego) may also be used for expression of the polypeptides in insect cells. Other plasmids include the pIN-IIIompA plasmids (see U.S. Pat. No. 4,575,013; see also Duffaud et al., Meth. Enz. 153:492-507, 1987), such as pIN-IIIompA2.

[0178] Preferably, the DNA molecule is replicated in bacterial cells, preferably in E. coli. The preferred DNA molecule also includes a bacterial origin of replication, to ensure the maintenance of the DNA molecule from generation to generation of the bacteria. In this way, large quantities of the DNA molecule can be produced by replication in bacteria. Preferred bacterial origins of replication include, but are not limited to, the f1-ori and col E1 origins of replication. Preferred hosts contain chromosomal copies of DNA encoding T7 RNA polymerase operably linked to an inducible promoter, such as the lacUV promoter (see U.S. Pat. No. 4,952,496). Such hosts include, but are not limited to, lysogens E. coli strains HMS174(DE3)pLysS, BL21(DE3)pLysS, HMS174(DE3) and BL21(DE3). Strain BL21(DE3) is preferred. The pLys strains provide low levels of T7 lysozyme, a natural inhibitor of T7 RNA polymerase.

[0179] The DNA molecules provided may also contain a gene coding for a repressor protein. The repressor protein is capable of repressing the transcription of a promoter that contains sequences of nucleotides to which the repressor protein binds. The promoter can be derepressed by altering the physiological conditions of the cell. For example, the alteration can be accomplished by adding to the growth medium a molecule that inhibits the ability to interact with the operator or with regulatory proteins or other regions of the DNA or by altering the temperature of the growth media. Preferred repressor proteins include, but are not limited to the E. coli lacd repressor responsive to IPTG induction, the temperature sensitive λ cI857 repressor, and the like. The E. coli lacI repressor is preferred.

[0180] In general, recombinant constructs of the subject invention will also contain elements necessary for transcription and translation. In particular, such elements are preferred where the recombinant expression construct containing nucleic acid sequences encoding binding domain-immunoglobulin fusion proteins is intended for expression in a host cell or organism. In certain embodiments of the present invention, cell type preferred or cell type specific expression of a cell binding domain-immunoglobulin fusion encoding gene may be achieved by placing the gene under regulation of a promoter. The choice of the promoter will depend upon the cell type to be transformed and the degree or type of control desired. Promoters can be constitutive or active and may further be cell type specific, tissue specific, individual cell specific, event specific, temporally specific or inducible. Cell-type specific promoters and event type specific promoters are preferred. Examples of constitutive or nonspecific promoters include the SV40 early promoter (U.S. Pat. No. 5,118,627), the SV40 late promoter (U.S. Pat. No. 5,118,627), CMV early gene promoter (U.S. Pat. No. 5,168,062), and adenovirus promoter. In addition to viral promoters, cellular promoters are also amenable within the context of this invention. In particular, cellular promoters for the so-called housekeeping genes are useful. Viral promoters are preferred, because generally they are stronger promoters than cellular promoters. Promoter regions have been identified in the genes of many eukaryotes including higher eukaryotes, such that suitable promoters for use in a particular host can be readily selected by those skilled in the art.

[0181] Inducible promoters may also be used. These promoters include MMTV LTR (PCT WO 91/13160), inducible by dexamethasone; metallothionein promoter, inducible by heavy metals; and promoters with cAMP response elements, inducible by cAMP. By using an inducible promoter, the nucleic acid sequence encoding a binding domain-immunoglobulin fusion protein may be delivered to a cell by the subject invention expression construct and will remain quiescent until the addition of the inducer. This allows further control on the timing of production of the gene product.

[0182] Event-type specific promoters are active or up-regulated only upon the occurrence of an event, such as tumorigenicity or viral infection. The HIV LTR is a well known example of an event-specific promoter. The promoter is inactive unless the tat gene product is present, which occurs upon viral infection. Some event-type promoters are also tissue-specific.

[0183] Additionally, promoters that are coordinately regulated with a particular cellular gene may be used. For example, promoters of genes that are coordinately expressed may be used when expression of a particular binding domain-immunoglobulin fusion protein-encoding gene is desired in concert with expression of one or more additional endogenous or exogenously introduced genes. This type of promoter is especially useful when one knows the pattern of gene expression relevant to induction of an immune response in a particular tissue of the immune system, so that specific immunocompetent cells within that tissue may be activated or otherwise recruited to participate in the immune response.

[0184] In addition to the promoter, repressor sequences, negative regulators, or tissue-specific silencers may be inserted to reduce non-specific expression of binding domain-immunoglobulin fusion protein encoding genes in certain situations, such as, for example, a host that is transiently immunocompromised as part of a therapeutic strategy. Multiple repressor elements may be inserted in the promoter region. Repression of transcription is independent on the orientation of repressor elements or distance from the promoter. One type of repressor sequence is an insulator sequence. Such sequences inhibit transcription (Dunaway et al., Mol Cell Biol 17: 182-9, 1997; Gdula et al., Proc Natl Acad Sci USA 93:9378-83, 1996, Chan et al., J Virol 70: 5312-28, 1996; Scott and Geyer, EMBO J 14:6258-67, 1995; Kalos and Fournier, Mol Cell Biol 15:198-207, 1995; Chung et al., Cell 74: 505-14, 1993) and will silence background transcription.

[0185] Repressor elements have also been identified in the promoter regions of the genes for type II (cartilage) collagen, choline acetyltransferase, albumin (Hu et al., J. Cell Growth Differ. 3(9):577-588, 1992), phosphoglycerate kinase (PGK-2) (Misuno et al., Gene 119(2):293-297, 1992), and in the 6-phosphofructo-2-kinase/fructose-2, 6-bisphosphatase gene. (Lemaigre et al., Mol. Cell Biol. 11(2):1099-1106.) Furthermore, the negative regulatory element Tse-1 has been identified in a number of liver specific genes, and has been shown to block cAMP response element- (CRE) mediated induction of gene activation in hepatocytes. (Boshart et al., Cell 61(5):905-916, 1990).

[0186] In preferred embodiments, elements that increase the expression of the desired product are incorporated into the construct. Such elements include internal ribosome binding sites (IRES; Wang and Siddiqui, Curr. Top. Microbiol. Immunol 203:99, 1995; Ehrenfeld and Semler, Curr. Top. Microbiol. Immunol. 203:65, 1995; Rees et al., Biotechniques 20:102, 1996; Sugimoto et al., Biotechnology 12:694, 1994). IRES increase translation efficiency. As well, other sequences may enhance expression. For some genes, sequences especially at the 5′ end inhibit transcription and/or translation. These sequences are usually palindromes that can form hairpin structures. Any such sequences in the nucleic acid to be delivered are generally deleted. Expression levels of the transcript or translated product are assayed to confirm or ascertain which sequences affect expression. Transcript levels may be assayed by any known method, including Northern blot hybridization, RNase probe protection and the like. Protein levels may be assayed by any known method, including ELISA, western blot, immunocytochemistry or other well known techniques.

[0187] Other elements may be incorporated into the binding domain-immunoglobulin fusion protein encoding constructs of the present invention. In preferred embodiments, the construct includes a transcription terminator sequence, including a polyadenylation sequence, splice donor and acceptor sites, and an enhancer. Other elements useful for expression and maintenance of the construct in mammalian cells or other eukaryotic cells may also be incorporated (e.g., origin of replication). Because the constructs are conveniently produced in bacterial cells, elements that are necessary for, or that enhance, propagation in bacteria are incorporated. Such elements include an origin of replication, a selectable marker and the like.

[0188] As provided herein, an additional level of controlling the expression of nucleic acids encoding binding domain-immunoglobulin fusion proteins delivered to cells using the constructs of the invention may be provided by simultaneously delivering two or more differentially regulated nucleic acid constructs. The use of such a multiple nucleic acid construct approach may permit coordinated regulation of an immune response such as, for example, spatiotemporal coordination that depends on the cell type and/or presence of another expressed encoded component. Those familiar with the art will appreciate that multiple levels of regulated gene expression may be achieved in a similar manner by selection of suitable regulatory sequences, including but not limited to promoters, enhancers and other well known gene regulatory elements.

[0189] The present invention also relates to vectors, and to constructs prepared from known vectors that include nucleic acids of the present invention, and in particular to “recombinant expression constructs” that include any nucleic acids encoding binding domain-immunoglobulin fusion proteins and polypeptides according to the invention as provided above; to host cells which are genetically engineered with vectors and/or constructs of the invention and to methods of administering expression constructs comprising nucleic acid sequences encoding such binding domain-immunoglobulin fusion polypeptides and fusion proteins of the invention, or fragments or variants thereof, by recombinant techniques. Binding domain-immunoglobulin fusion proteins can be expressed in virtually any host cell under the control of appropriate promoters, depending on the nature of the construct (e.g., type of promoter, as described above), and on the nature of the desired host cell (e.g., whether postmitotic terminally differentiated or actively dividing; e.g., whether the expression construct occurs in host cell as an episome or is integrated into host cell genome). Appropriate cloning and expression vectors for use with prokaryotic and eukaryotic hosts are described by Sambrook, et al., Molecular Cloning: A Laboratory Manual, Second Edition, Cold Spring Harbor, N.Y., (1989); as noted above, in particularly preferred embodiments of the invention, recombinant expression is conducted in mammalian cells that have been transfected or transformed with the subject invention recombinant expression construct.

[0190] Typically, the constructs are derived from plasmid vectors. A preferred construct is a modified pNASS vector (Clontech, Palo Alto, Calif.), which has nucleic acid sequences encoding an ampicillin resistance gene, a polyadenylation signal and a T7 promoter site. Other suitable mammalian expression vectors are well known (see, e.g., Ausubel et al., 1995; Sambrook et al., supra; see also, e.g., catalogues from Invitrogen, San Diego, Calif.; Novagen, Madison, Wis.; Pharmacia, Piscataway, N.J.; and others). Presently preferred constructs may be prepared that include a dihydrofolate reductase (DHFR) encoding sequence under suitable regulatory control, for promoting enhanced production levels of the binding domain-immunoglobulin fusion protei, which levels result from gene amplification following application of an appropriate selection agent (e.g., methetrexate).

[0191] Generally, recombinant expression vectors will include origins of replication and selectable markers permitting transformation of the host cell, and a promoter derived from a highly-expressed gene to direct transcription of a downstream structural sequence, as described above. The heterologous structural sequence is assembled in appropriate phase with translation initiation and termination sequences. Thus, for example, the binding domain-immunoglobulin fusion protein encoding nucleic acids as provided herein may be included in any one of a variety of expression vector constructs as a recombinant expression construct for expressing a binding domain-immunoglobulin fusion polypeptide in a host cell. In certain preferred embodiments the constructs are included in formulations that are administered in vivo. Such vectors and constructs include chromosomal, nonchromosomal and synthetic DNA sequences, e.g., derivatives of SV40; bacterial plasmids; phage DNA; yeast plasmids; vectors derived from combinations of plasmids and phage DNA, viral DNA, such as vaccinia, adenovirus, fowl pox virus, and pseudorabies, or replication deficient retroviruses as described below. However, any other vector may be used for preparation of a recombinant expression construct, and in preferred embodiments such a vector will be replicable and viable in the host.

[0192] The appropriate DNA sequence(s) may be inserted into the vector by a variety of procedures. In general, the DNA sequence is inserted into an appropriate restriction endonuclease site(s) by procedures known in the art. Standard techniques for cloning, DNA isolation, amplification and purification, for enzymatic reactions involving DNA ligase, DNA polymerase, restriction endonucleases and the like, and various separation techniques are those known and commonly employed by those skilled in the art. A number of standard techniques are described, for example, in Ausubel et al. (1993 Current Protocols in Molecular Biology, Greene Publ. Assoc. Inc. & John Wiley & Sons, Inc., Boston, Mass.); Sambrook et al. (1989 Molecular Cloning, Second Ed., Cold Spring Harbor Laboratory, Plainview, N.Y.); Maniatis et al. (1982 Molecular Cloning, Cold Spring Harbor Laboratory, Plainview, N.Y.); Glover (Ed.) (1985 DNA Cloning Vol. I and II, IRL Press, Oxford, UK); Hames and Higgins (Eds.), (1985 Nucleic Acid Hybridization, IRL Press, Oxford, UK); and elsewhere.

[0193] The DNA sequence in the expression vector is operatively linked to at least one appropriate expression control sequences (e.g., a constitutive promoter or a regulated promoter) to direct mRNA synthesis. Representative examples of such expression control sequences include promoters of eukaryotic cells or their viruses, as described above. Promoter regions can be selected from any desired gene using CAT (chloramphenicol transferase) vectors or other vectors with selectable markers. Eukaryotic promoters include CMV immediate early, HSV thymidine kinase, early and late SV40, LTRs from retrovirus, and mouse metallothionein-I. Selection of the appropriate vector and promoter is well within the level of ordinary skill in the art, and preparation of certain particularly preferred recombinant expression constructs comprising at least one promoter or regulated promoter operably linked to a nucleic acid encoding an binding domain-immunoglobulin fusion polypeptide is described herein.

[0194] Transcription of the DNA encoding the polypeptides of the present invention by higher eukaryotes may be increased by inserting an enhancer sequence into the vector. Enhancers are cis-acting elements of DNA, usually about from 10 to 300 bp that act on a promoter to increase its transcription. Examples including the SV40 enhancer on the late side of the replication origin bp 100 to 270, a cytomegalovirus early promoter enhancer, the polyoma enhancer on the late side of the replication origin, and adenovirus enhancers.

[0195] As provided herein, in certain embodiments the vector may be a viral vector such as a retroviral vector. (Miller et al., 1989 BioTechniques 7:980; Coffin and Varmus, 1996 Retroviruses, Cold Spring Harbor Laboratory Press, NY.) For example, retroviruses from which the retroviral plasmid vectors may be derived include, but are not limited to, Moloney Murine Leukemia Virus, spleen necrosis virus, retroviruses such as Rous Sarcoma Virus, Harvey Sarcoma virus, avian leukosis virus, gibbon ape leukemia virus, human immunodeficiency virus, adenovirus, Myeloproliferative Sarcoma Virus, and mammary tumor virus.

[0196] Retroviruses are RNA viruses which can replicate and integrate into the genome of a host cell via a DNA intermediate. This DNA intermediate, or provirus, may be stably integrated into the host cell DNA. According to certain embodiments of the present invention, an expression construct may comprise a retrovirus into which a foreign gene that encodes a foreign protein is incorporated in place of normal retroviral RNA. When retroviral RNA enters a host cell coincident with infection, the foreign gene is also introduced into the cell, and may then be integrated into host cell DNA as if it were part of the retroviral genome. Expression of this foreign gene within the host results in expression of the foreign protein.

[0197] Most retroviral vector systems which have been developed for gene therapy are based on murine retroviruses. Such retroviruses exist in two forms, as free viral particles referred to as virions, or as proviruses integrated into host cell DNA. The virion form of the virus contains the structural and enzymatic proteins of the retrovirus (including the enzyme reverse transcriptase), two RNA copies of the viral genome, and portions of the source cell plasma membrane containing viral envelope glycoprotein. The retroviral genome is organized into four main regions: the Long Terminal Repeat (LTR), which contains cis-acting elements necessary for the initiation and termination of transcription and is situated both 5′ and 3′ of the coding genes, and the three coding genes gag, pol, and env. These three genes gag, pol, and env encode, respectively, internal viral structures, enzymatic proteins (such as integrase), and the envelope glycoprotein (designated gp70 and p15e) which confers infectivity and host range specificity of the virus, as well as the “R” peptide of undetermined function.

[0198] Separate packaging cell lines and vector producing cell lines have been developed because of safety concerns regarding the uses of retroviruses, including their use in expression constructs as provided by the present invention. Briefly, this methodology employs the use of two components, a retroviral vector and a packaging cell line (PCL). The retroviral vector contains long terminal repeats (LTRs), the foreign DNA to be transferred and a packaging sequence (y). This retroviral vector will not reproduce by itself because the genes which encode structural and envelope proteins are not included within the vector genome. The PCL contains genes encoding the gag, pol, and env proteins, but does not contain the packaging signal “y”. Thus, a PCL can only form empty virion particles by itself. Within this general method, the retroviral vector is introduced into the PCL, thereby creating a vector-producing cell line (VCL). This VCL manufactures virion particles containing only the retroviral vector's (foreign) genome, and therefore has previously been considered to be a safe retrovirus vector for therapeutic use.

[0199] “Retroviral vector construct” refers to an assembly which is, within preferred embodiments of the invention, capable of directing the expression of a sequence(s) or gene(s) of interest, such as binding domain-immunoglobulin fusion encoding nucleic acid sequences. Briefly, the retroviral vector construct must include a 5′ LTR, a tRNA binding site, a packaging signal, an origin of second strand DNA synthesis and a 3′ LTR. A wide variety of heterologous sequences may be included within the vector construct, including for example, sequences which encode a protein (e.g., cytotoxic protein, disease-associated antigen, immune accessory molecule, or replacement gene), or which are useful as a molecule itself (e.g., as a ribozyme or antisense sequence).

[0200] Retroviral vector constructs of the present invention may be readily constructed from a wide variety of retroviruses, including for example, B, C, and D type retroviruses as well as spumaviruses and lentiviruses (see, e.g., RNA Tumor Viruses, Second Edition, Cold Spring Harbor Laboratory, 1985). Such retroviruses may be readily obtained from depositories or collections such as the American Type Culture Collection (“ATCC”; Rockville, Md.), or isolated from known sources using commonly available techniques. Any of the above retroviruses may be readily utilized in order to assemble or construct retroviral vector constructs, packaging cells, or producer cells of the present invention given the disclosure provided herein, and standard recombinant techniques (e.g., Sambrook et al, Molecular Cloning: A Laboratory Manual, 2d ed., Cold Spring Harbor Laboratory Press, 1989; Kunkle, PNAS 82:488, 1985).

[0201] Suitable promoters for use in viral vectors generally may include, but are not limited to, the retroviral LTR; the SV40 promoter; and the human cytomegalovirus (CMV) promoter described in Miller, et al., Biotechniques 7:980-990 (1989), or any other promoter (e.g., cellular promoters such as eukaryotic cellular promoters including, but not limited to, the histone, pol III, and β-actin promoters). Other viral promoters which may be employed include, but are not limited to, adenovirus promoters, thymidine kinase (TK) promoters, and B19 parvovirus promoters. The selection of a suitable promoter will be apparent to those skilled in the art from the teachings contained herein, and may be from among either regulated promoters or promoters as described above.

[0202] As described above, the retroviral plasmid vector is employed to transduce packaging cell lines to form producer cell lines. Examples of packaging cells which may be transfected include, but are not limited to, the PE501, PA317, ψ-2, ψ-AM, PA12, T19-14X, VT-19-17-H2, ψCRE, ψCRIP, GP+E-86, GP+envAm12, and DAN cell lines as described in Miller, Human Gene Therapy, 1:5-14 (1990). The vector may transduce the packaging cells through any means known in the art. Such means include, but are not limited to, electroporation, the use of liposomes, and CaPO₄ precipitation. In one alternative, the retroviral plasmid vector may be encapsulated into a liposome, or coupled to a lipid, and then administered to a host.

[0203] The producer cell line generates infectious retroviral vector particles which include the nucleic acid sequence(s) encoding the binding domain-immunoglobulin fusion polypeptides or fusion proteins. Such retroviral vector particles then may be employed, to transduce eukaryotic cells, either in vitro or in vivo. The transduced eukaryotic cells will express the nucleic acid sequence(s) encoding the binding domain-immunoglobulin fusion polypeptide or fusion protein. Eukaryotic cells which may be transduced include, but are not limited to, embryonic stem cells, as well as hematopoietic stem cells, hepatocytes, fibroblasts, circulating peripheral blood mononuclear and polymorphonuclear cells including myelomonocytic cells, lymphocytes, myoblasts, tissue macrophages, dendritic cells, Kupffer cells, lymphoid and reticuloendothelia cells of the lymph nodes and spleen, keratinocytes, endothelial cells, and bronchial epithelial cells.

[0204] As another example of an embodiment of the invention in which a viral vector is used to prepare the recombinant binding domain-immunoglobulin fusion expression construct, in one preferred embodiment, host cells transduced by a recombinant viral construct directing the expression of binding domain-immunoglobulin fusion polypeptides or fusion proteins may produce viral particles containing expressed binding domain-immunoglobulin fusion polypeptides or fusion proteins that are derived from portions of a host cell membrane incorporated by the viral particles during viral budding.

[0205] In another aspect, the present invention relates to host cells containing the above described recombinant binding domain-immunoglobulin fusion expression constructs. Host cells are genetically engineered (transduced, transformed or transfected) with the vectors and/or expression constructs of this invention which may be, for example, a cloning vector, a shuttle vector or an expression construct. The vector or construct may be, for example, in the form of a plasmid, a viral particle, a phage, etc. The engineered host cells can be cultured in conventional nutrient media modified as appropriate for activating promoters, selecting transformants or amplifying particular genes such as genes encoding binding domain-immunoglobulin fusion polypeptides or binding domain-immunoglobulin fusion fusion proteins. The culture conditions for particular host cells selected for expression, such as temperature, pH and the like, will be readily apparent to the ordinarily skilled artisan.

[0206] The host cell can be a higher eukaryotic cell, such as a mammalian cell, or a lower eukaryotic cell, such as a yeast cell, or the host cell can be a prokaryotic cell, such as a bacterial cell. Representative examples of appropriate host cells according to the present invention include, but need not be limited to, bacterial cells, such as E. coli, Streptomyces, Salmonella tvphimurium; fungal cells, such as yeast; insect cells, such as Drosophila S2 and Spodoptera Sf9; animal cells, such as CHO, COS or 293 cells; adenoviruses; plant cells, or any suitable cell already adapted to in vitro propagation or so established de novo. The selection of an appropriate host is deemed to be within the scope of those skilled in the art from the teachings herein.

[0207] Various mammalian cell culture systems can also be employed to express recombinant protein. Examples of mammalian expression systems include the COS-7 lines of monkey kidney fibroblasts, described by Gluzman, Cell 23:175 (1981), and other cell lines capable of expressing a compatible vector, for example, the C127, 3T3, CHO, HeLa and BHK cell lines. Mammalian expression vectors will comprise an origin of replication, a suitable promoter and enhancer, and also any necessary ribosome binding sites, polyadenylation site, splice donor and acceptor sites, transcriptional termination sequences, and 5′ flanking nontranscribed sequences, for example as described herein regarding the preparation of binding domain-immunoglobulin fusion expression constructs. DNA sequences derived from the SV40 splice, and polyadenylation sites may be used to provide the required nontranscribed genetic elements. Introduction of the construct into the host cell can be effected by a variety of methods with which those skilled in the art will be familiar, including but not limited to, for example, calcium phosphate transfection, DEAE-Dextran mediated transfection, or electroporation (Davis et al., 1986 Basic Methods in Molecular Biology).

[0208] The present invention binding domain-immunoglobulin fusion proteins, or compositions comprising one or more polynucleotides encoding same as described herein, (for example, to be administered under conditions and for a time sufficient to permit expression of a binding domain-immunoglobulin fusion protein in a host cell in vivo or in vitro), may be formulated into pharmaceutical compositions for administration according to well known methodologies. Pharmaceutical compositions generally comprise one or more recombinant expression constructs, and/or expression products of such constructs, in combination with a pharmaceutically acceptable carrier, excipient or diluent. Such carriers will be nontoxic to recipients at the dosages and concentrations employed. For nucleic acid-based formulations, or for formulations comprising expression products of the subject invention recombinant constructs, about 0.01 μg/kg to about 100 mg/kg body weight will be adminstered, typically by the intradermal, subcutaneous, intramuscular or intravenous route, or by other routes. A preferred dosage is about 1 μg/kg to about 1 mg/kg, with about 5 μg/kg to about 200 μg/kg particularly preferred. It will be evident to those skilled in the art that the number and frequency of administration will be dependent upon the response of the host. “Pharmaceutically acceptable carriers” for therapeutic use are well known in the pharmaceutical art, and are described, for example, in Remingtons Pharmaceutical Sciences, Mack Publishing Co. (A. R. Gennaro edit. 1985). For example, sterile saline and phosphate-buffered saline at physiological pH may be used. Preservatives, stabilizers, dyes and even flavoring agents may be provided in the pharmaceutical composition. For example, sodium benzoate, sorbic acid and esters of p-hydroxybenzoic acid may be added as preservatives. Id. at 1449. In addition, antioxidants and suspending agents may be used. Id.

[0209] “Pharmaceutically acceptable salt” refers to salts of the compounds of the present invention derived from the combination of such compounds and an organic or inorganic acid (acid addition salts) or an organic or inorganic base (base addition salts). The compounds of the present invention may be used in either the free base or salt forms, with both forms being considered as being within the scope of the present invention.

[0210] The pharmaceutical compositions that contain one or more binding domain-immunoglobulin fusion protein encoding constructs (or their expressed products) may be in any form which allows for the composition to be administered to a patient. For example, the composition may be in the form of a solid, liquid or gas (aerosol). Typical routes of administration include, without limitation, oral, topical, parenteral (e.g., sublingually or buccally), sublingual, rectal, vaginal, and intranasal. The term parenteral as used herein includes subcutaneous injections, intravenous, intramuscular, intrasternal, intracavernous, intrathecal, intrameatal, intraurethral injection or infusion techniques. The pharmaceutical composition is formulated so as to allow the active ingredients contained therein to be bioavailable upon administration of the composition to a patient. Compositions that will be administered to a patient take the form of one or more dosage units, where for example, a tablet may be a single dosage unit, and a container of one or more compounds of the invention in aerosol form may hold a plurality of dosage units.

[0211] For oral administration, an excipient and/or binder may be present. Examples are sucrose, kaolin, glycerin, starch dextrins, sodium alginate, carboxymethylcellulose and ethyl cellulose. Coloring and/or flavoring agents may be present. A coating shell may be employed.

[0212] The composition may be in the form of a liquid, e.g., an elixir, syrup, solution, emulsion or suspension. The liquid may be for oral administration or for delivery by injection, as two examples. When intended for oral administration, preferred compositions contain, in addition to one or more binding domain-immunoglobulin fusion construct or expressed product, one or more of a sweetening agent, preservatives, dye/colorant and flavor enhancer. In a composition intended to be administered by injection, one or more of a surfactant, preservative, wetting agent, dispersing agent, suspending agent, buffer, stabilizer and isotonic agent may be included.

[0213] A liquid pharmaceutical composition as used herein, whether in the form of a solution, suspension or other like form, may include one or more of the following adjuvants: sterile diluents such as water for injection, saline solution, preferably physiological saline, Ringer's solution, isotonic sodium chloride, fixed oils such as synthetic mono or digylcerides which may serve as the solvent or suspending medium, polyethylene glycols, glycerin, propylene glycol or other solvents; antibacterial agents such as benzyl alcohol or methyl paraben; antioxidants such as ascorbic acid or sodium bisulfite; chelating agents such as ethylenediaminetetraacetic acid; buffers such as acetates, citrates or phosphates and agents for the adjustment of tonicity such as sodium chloride or dextrose. The parenteral preparation can be enclosed in ampoules, disposable syringes or multiple dose vials made of glass or plastic. Physiological saline is a preferred adjuvant. An injectable pharmaceutical composition is preferably sterile.

[0214] It may also be desirable to include other components in the preparation, such as delivery vehicles including but not limited to aluminum salts, water-in-oil emulsions, biodegradable oil vehicles, oil-in-water emulsions, biodegradable microcapsules, and liposomes. Examples of immunostimulatory substances (adjuvants) for use in such vehicles include N-acetylmuramyl-L-alanine-D-isoglutamine (MDP), lipopolysaccharides (LPS), glucan, IL-12, GM-CSF, gamma interferon and IL-15.

[0215] While any suitable carrier known to those of ordinary skill in the art may be employed in the pharmaceutical compositions of this invention, the type of carrier will vary depending on the mode of administration and whether a sustained release is desired. For parenteral administration, such as subcutaneous injection, the carrier preferably comprises water, saline, alcohol, a fat, a wax or a buffer. For oral administration, any of the above carriers or a solid carrier, such as mannitol, lactose, starch, magnesium stearate, sodium saccharine, talcum, cellulose, glucose, sucrose, and magnesium carbonate, may be employed. Biodegradable microspheres (e.g., polylactic galactide) may also be employed as carriers for the pharmaceutical compositions of this invention. Suitable biodegradable microspheres are disclosed, for example, in U.S. Pat. Nos. 4,897,268 and 5,075,109. In this regard, it is preferable that the microsphere be larger than approximately 25 microns.

[0216] Pharmaceutical compositions may also contain diluents such as buffers, antioxidants such as ascorbic acid, low molecular weight (less than about 10 residues) polypeptides, proteins, amino acids, carbohydrates including glucose, sucrose or dextrins, chelating agents such as EDTA, glutathione and other stabilizers and excipients. Neutral buffered saline or saline mixed with nonspecific serum albumin are exemplary appropriate diluents. Preferably, product is formulated as a lyophilizate using appropriate excipient solutions (e.g., sucrose) as diluents.

[0217] As described above, the subject invention includes compositions capable of delivering nucleic acid molecules encoding binding domain-immunoglobulin fusion proteins. Such compositions include recombinant viral vectors (e.g., retroviruses (see WO 90/07936, WO 91/02805, WO 93/25234, WO 93/25698, and WO 94/03622), adenovirus (see Berkner, Biotechniques 6:616-627, 1988; Li et al., Hum. Gene Ther. 4:403-409, 1993; Vincent et al., Nat. Genet. 5:130-134, 1993; and Kolls et al., Proc. Natl. Acad. Sci. USA 91:215-219, 1994), pox virus (see U.S. Pat. No. 4,769,330; U.S. Pat. No. 5,017,487; and WO 89/01973)), recombinant expression construct nucleic acid molecules complexed to a polycationic molecule (see WO 93/03709), and nucleic acids associated with liposomes (see Wang et al., Proc. Natl. Acad. Sci. USA 84:7851, 1987). In certain embodiments, the DNA may be linked to killed or inactivated adenovirus (see Curiel et al., Hum. Gene Ther. 3:147-154, 1992; Cotton et al., Proc. Natl. Acad. Sci. USA 89:6094, 1992). Other suitable compositions include DNA-ligand (see Wu et al., J. Biol. Chem. 264:16985-16987, 1989) and lipid-DNA combinations (see Felgner et al., Proc. Natl. Acad. Sci. USA 84:7413-7417, 1989).

[0218] In addition to direct in vivo procedures, ex vivo procedures may be used in which cells are removed from a host, modified, and placed into the same or another host animal. It will be evident that one can utilize any of the compositions noted above for introduction of binding domain-immunoglobulin fusion proteins or of binding domain-immunoglobulin fusion protein encoding nucleic acid molecules into tissue cells in an ex vivo context. Protocols for viral, physical and chemical methods of uptake are well known in the art.

[0219] Accordingly, the present invention is useful for treating a patient having a B-cell disorder or a malignant condition, or for treating a cell culture derived from such a patient. As used herein, the term “patient” refers to any warm-blooded animal, preferably a human. A patient may be afflicted with cancer or a malignant condition, such as B-cell lymphoma, or may be normal (i.e., free of detectable disease and infection). A “cell culture” includes any preparation amenable to ex vivo treatment, for example a preparation containing immunocompetent cells or isolated cells of the immune system (including, but not limited to, T cells, macrophages, monocytes, B cells and dendritic cells). Such cells may be isolated by any of a variety of techniques well known to those of ordinary skill in the art (e.g., Ficoll-hypaque density centrifugation). The cells may (but need not) have been isolated from a patient afflicted with a B-cell disorder or a malignant condition, and may be reintroduced into a patient after treatment.

[0220] A liquid composition intended for either parenteral or oral administration should contain an amount of binding domain-immunoglobulin fusion protein encoding construct or expressed product such that a suitable dosage will be obtained. Typically, this amount is at least 0.01 wt % of a binding domain-immunoglobulin fusion construct or expressed product in the composition. When intended for oral administration, this amount may be varied to be between 0.1 and about 70% of the weight of the composition. Preferred oral compositions contain between about 4% and about 50% of binding domain-immunoglobulin fusion construct or expressed product(s). Preferred compositions and preparations are prepared so that a parenteral dosage unit contains between 0.01 to 1% by weight of active compound.

[0221] The pharmaceutical composition may be intended for topical administration, in which case the carrier may suitably comprise a solution, emulsion, ointment or gel base. The base, for example, may comprise one or more of the following: petrolatum, lanolin, polyethylene glycols, beeswax, mineral oil, diluents such as water and alcohol, and emulsifiers and stabilizers. Thickening agents may be present in a pharmaceutical composition for topical administration. If intended for transdermal administration, the composition may include a transdermal patch or iontophoresis device. Topical formulations may contain a concentration of the binding domain-immunoglobulin fusion construct or expressed product of from about 0.1 to about 10% w/v (weight per unit volume).

[0222] The composition may be intended for rectal administration, in the form, e.g., of a suppository which will melt in the rectum and release the drug. The composition for rectal administration may contain an oleaginous base as a suitable nonirritating excipient. Such bases include, without limitation, lanolin, cocoa butter and polyethylene glycol.

[0223] In the methods of the invention, the binding domain-immunoglobulin fusion encoding constructs or expressed product(s) may be administered through use of insert(s), bead(s), timed-release formulation(s), patch(es) or fast-release formulation(s).

[0224] The following Examples are offered by way of illustration and not by way of limitation.

### EXAMPLES

### Example 1

[0225] Cloning of the 2H7 Variable Regions and Construction and Sequencing of 2H7scFV-IG

[0226] This Example illustrates the cloning of cDNA molecules that encode the heavy chain and light chain variable regions of the monoclonal antibody 2H7. This Example also demonstrates the construction, sequencing, and expression of 2H7scFv-Ig.

[0227] Hybridoma cells expressing 2H7 monoclonal antibody that specifically bound to CD20 were provided by Ed Clark at the University of Washington, Seattle, Wash. Prior to harvesting, hybridoma cells were kept in log phase growth for several days in RPMI 1640 media Invitrogen/Life Technologies, Gaithersburg, Md.) supplemented with glutamine, pyruvate, DMEM non-essential amino acids, and penicillin-streptomycin. Cells were pelleted by centrifugation from the culture medium, and 2×10⁷ cells were used to prepare RNA. RNA was isolated from the 2H7-producing hybridoma cells using the Pharmingen (San Diego, Calif.) total RNA isolation kit (Catalog #45520K) according to the manufacturer's instructions accompanying the kit. One microgram (1 μg) of total RNA was used as template to prepare cDNA by reverse transcription. The RNA and 300 ng random primers were combined and denatured at 72° C. for 10 minutes prior to addition of enzyme. Superscript II reverse transcriptase (Life Technologies) was added to the RNA plus primer mixture in a total volume of 25 μl in the presence of 5×second strand buffer and 0.1 M DTT provided with the enzyme. The reverse transcription reaction was allowed to proceed at 42° C. for one hour.

[0228] The 2H7 cDNA generated in the randomly primed reverse transcriptase reaction and V region specific primers were used to amplify by PCR the variable regions for the light and heavy chain of the 2H7 antibody. The V region specific primers were designed using the published sequence (Genbank accession numbers M17954 for V_{L} and M17953 for V_{H}) as a guide. The two variable chains were designed with compatible end sequences so that an scFv could be assembled by ligation of the two V regions after amplification and restriction enzyme digestion.

[0229] A (gly₄ser)₃ peptide linker to be inserted between the two V regions was incorporated by adding the extra nucleotides to the antisense primer for the V_{L} of 2H7. A Sac I restriction site was also introduced at the junction between the two V regions. The sense primer used to amplify the 2H7 V_{L}, that included a HindIII restriction site and the light chain leader peptide was 5′-gtc aag ctt gcc gcc atg gat ttt caa gtg cag att ttt cag c-3′ (SEQ ID NO:______). The antisense primer was 5′-gtc gtc gag ctc cca cct cct cca gat cca cca ccg ccc gag cca ccg cca cct ttc agc tcc agc ttg gtc cc-3′ (SEQ ID NO:______). The reading frame of the V region is indicated as a bold, underlined codon. The Hind III and SacI sites are indicated by underlined italicized sequences.

[0230] The V_{H} domain was amplified without a leader peptide, but included a 5′ SacI restriction site for fusion to the V_{L} and a BclI restriction site at the 3′ end for fusion to various tails, including the human IgG1 Fc domain and the truncated forms of CD40 ligand, CD154. The sense primer was 5′-gct gct gag ctc tca ggc tta tct aca gca agt ctg g-3′ (SEQ ID NO:______). The SacI site is indicated in italicized and underlined font, and the reading frame of the codon for the first amino acid of the V_{H} domain is indicated in bold, underlined type. The antisense primer was 5′-gtt gtc tga tca gag acg gtg acc gtg gtc cc-3′ (SEQ ID NO:______). The BclI site is indicated in italicized, underlined type, and the last serine of the V_{H} domain sequence is indicated in bold, underlined type.

[0231] The scFv-Ig was assembled by inserting the 2H7 scFv HindIII-BclI fragment into pUC19 containing the human IgG1 hinge, CH2, and CH3 regions, which was digested with restriction enzymes, HindIII and BclI. After ligation, the ligation products were transformed into DH5α bacteria. Positive clones were screened for the properly inserted fragments using the SacI site at the V_{L}-V_{H} junction of 2H7 as a diagnostic site. The 2H7scFv-Ig cDNA was subjected to cycle sequencing on a PE 9700 thermocycler using a 25-cycle program by denaturing at 96° C. for 10 seconds, annealing at 50° C. for 30 seconds, and extending at 72° C. for 4 minutes. The sequencing primers were pUC forward and reverse primers and an internal primer that annealed to the CH2 domain human in the IgG constant region portion. Sequencing reactions were performed using the Big Dye Terminator Ready Sequencing Mix (PE-Applied Biosystems, Foster City, Calif.) according to the manufacturer's instructions. Samples were subsequently purified using Centrisep columns (Catalog #CS-901, Princeton Separations, Adelphia, N.J.), the eluates dried in a Savant vacuum dryer, denatured in Template Suppression Reagent (PE-ABI), and analyzed on an ABI 310 Genetic Analyzer (PE-Applied Biosystems). The sequence was edited, translated, and analyzed using Vector Nti version 6.0 (Informax, North Bethesda, Md.). FIG. 1 shows the cDNA and predicted amino acid sequence of the 2H7scFv-Ig construct.

### Example 2

[0232] Expression of 2H7 scFv-Ig in Stable CHO Cell Lines

[0233] This Example illustrates expression of 2H7scFv-Ig in a eukaryotic cell line and characterization of the expressed 2H7scFv-Ig by SDS-PAGE and by functional assays, including ADCC and complement fixation.

[0234] The 2H7scFv-Ig HindIII-XbaI (˜1.6 kb) fragment with correct sequence was inserted into the mammalian expression vector pD18, and DNA from positive clones was amplified using QIAGEN plasmid preparation kits (QIAGEN, Valencia, Calif.). The recombinant plasmid DNA (100 μg) was then linearized in a nonessential region by digestion with AscI, purified by phenol extraction, and resuspended in tissue culture media, Excell 302 (Catalog #14312-79P, JRH Biosciences, Lenexa, Kans.). Cells for transfection, CHO DG44 cells, were kept in logarithmic growth, and 10⁷ cells harvested for each transfection reaction. Linearized DNA was added to the CHO cells in a total volume of 0.8 ml for electroporation.

[0235] Stable production of the 2H7 scFv-Ig fusion protein (SEQ. ID NO:10) was achieved by electroporation of a selectable, amplifiable plasmid, pD18, containing the 2H7 scFv-Ig cDNA under the control of the CMV promoter, into Chinese Hamster Ovary (CHO) cells (all cell lines from American Type Culture Collection, Manassas, Va., unless otherwise noted). The 2H7 expression cassette was subcloned downstream of the CMV promoter into the vector multiple cloning site as a ˜1.6 kb HindIII-XbaI fragment. The pD18 vector is a modified version of pcDNA3 encoding the DHFR selectable marker with an attenuated promoter to increase selection pressure for the plasmid. Plasmid DNA was prepared using Qiagen maxiprep kits, and purified plasmid was linearized at a unique AscI site prior to phenol extraction and ethanol precipitation. Salmon sperm DNA (Sigma-Aldrich, St. Louis, Mo.) was added as carrier DNA, and 100 μg each of plasmid and carrier DNA was used to transfect 10⁷ CHO DG44 cells by electroporation. Cells were grown to logarithmic phase in Excell 302 media (JRH Biosciences) containing glutamine (4 mM), pyruvate, recombinant insulin, penicillin-streptomycin, and 2×DMEM nonessential amino acids (all from Life Technologies, Gaithersburg, Md.), hereafter referred to as “Excell 302 complete” media. Media for untransfected cells also contained HT (diluted from a 100×solution of hypoxanthine and thymidine) (Invitrogen/Life Technologies). Media for transfections under selection contained varying levels of methotrexate (Sigma-Aldrich) as selective agent, ranging from 50 nM to 5 μM. Electroporations were performed at 275 volts, 950 μF. Transfected cells were allowed to recover overnight in non-selective media prior to selective plating in 96 well flat bottom plates (Costar) at varying serial dilutions ranging from 125 cells/well to 2000 cells/well. Culture media for cell cloning was Excell 302 complete, containing 100 nM methotrexate. Once clonal outgrowth was sufficient, serial dilutions of culture supernatants from master wells were screened for binding to CD20-CHO transfected cells. The clones with the highest production of the fusion protein were expanded into T25 and then T75 flasks to provide adequate numbers of cells for freezing and for scaling up production of the 2H7scFvIg. Production levels were further increased in cultures from three clones by progressive amplification in methotrexate containing culture media. At each successive passage of cells, the Excell 302 complete media contained an increased concentration of methotrexate, such that only the cells that amplified the DHFR plasmid could survive.

[0236] Supernatants were collected from CHO cells expressing the 2H7scFv-Ig, filtered through 0.2 μm PES express filters (Nalgene, Rochester, N.Y.) and were passed over a Protein A-agarose (IPA 300 crosslinked agarose) column (Repligen, Needham, Mass.). The column was washed with PBS, and then bound protein was eluted using 0.1 M citrate buffer, pH 3.0. Fractions were collected and eluted protein was neutralized using 1M Tris, pH 8.0, prior to dialysis overnight in PBS. Concentration of the purified 2H7scFv-Ig (SEQ ID NO:______) was determined by absorption at 280 nm. An extinction coefficient of 1.77 was determined using the protein analysis tools in the Vector Nti Version 6.0 Software package (Informax, North Bethesda, Md.). This program uses the amino acid composition data to calculate extinction coefficients.

[0237] Production levels of 2H7scFv-Ig by transfected, stable CHO cells were analyzed by flow cytometry. Purified 2H7scFv-Ig to CHO cells was allowed to bind to CHO cells that expressed CD20 (CD20 CHO) and analyzed by flow cytometry using a fluorescein-conjugated anti-human IgG second step reagent (Catalog Numbers H10101 and H10501, CalTag, Burlingame, Calif.). FIG. 2 (top) shows a standard curve generated by titration of 2H7scFv-Ig binding to CD20 CHO. At each concentration of 2H7scFv-Ig, the mean brightness of the fluorescein signal in linear units is shown. Supernatants collected from T flasks containing stable CHO cell clones expressing 2H7scFv-Ig were then allowed to bind to CD20 CHO and the binding was analyzed by flow cytometry. The fluorescein signal generated by 2H7scFv-Ig contained in the supernatants was measured and the 2H7scFv-Ig concentration in the supernatants was calculated from the standard curve (FIG. 2, bottom).

[0238] Purified 2H7scFv-Ig (SEQ ID NO:______) was analyzed by electrophoresis on SDS-Polyacrylamide gels. Samples of 2H7scFv-Ig, purified by independent Protein A Agarose column runs, were boiled in SDS sample buffer without reduction of disulfide bonds and applied to SDS 10% Tris-BIS gels (Catalog #NP0301, Novex, Carlsbad, Calif.). Twenty micrograms of each purified batch was loaded on the gels. The proteins were visualized after electrophoresis by Coomassie Blue staining (Pierce Gel Code Blue Stain Reagent, Catalog #24590, Pierce, Rockford, Ill.), and destaining in distilled water. Molecular weight markers were included on the same gel (Kaleidoscope Prestained Standards, Catalog #161-0324, Bio-Rad, Hercules, Calif.). The results are presented in FIG. 3. The numbers above the lanes designate independent purification batches. The molecular weights in kilodaltons of the size markers are indicated on the left side of the figure. Further experiments with alternative sample preparation conditions indicated that reduction of disulfide bonds by boiling the protein in SDS sample buffer containing DTT or 2-mercaptoethanol caused the 2H7scFv-Ig to aggregate.

[0239] Any number of other immunological parameters may be monitored using routine assays that are well known in the art. These may include, for example, antibody dependent cell-mediated cytotoxicity (ADCC) assays, secondary in vitro antibody responses, flow immunocytofluorimetric analysis of various peripheral blood or lymphoid mononuclear cell subpopulations using well established marker antigen systems, immunohistochemistry or other relevant assays. These and other assays may be found, for example, in Rose et al. (Eds.), Manual of Clinical Laboratory Immunology, 5^{th} Ed., 1997 American Society of Microbiology, Washington, D.C.

[0240] The ability of 2H7scFv-Ig to kill CD20 positive cells in the presence of complement was tested using B cell lines Ramos and Bjab. Rabbit complement (Pel-Freez, Rogers, A K) was used in the assay at a final dilution of 1/10. Purified 2H7scFv-Ig was incubated with B cells and complement for 45 minutes at 37° C., followed by counting of live and dead cells by trypan blue exclusion. The results in FIG. 4A show that in the presence of rabbit complement, 2H7scFv-Ig lysed B cells expressing CD20.

[0241] The ability of 2H7scFv-Ig to kill CD20 positive cells in the presence of peripheral blood mononuclear cells (PBMC) was tested by measuring the release of ⁵¹Cr from labeled Bjab cells in a 4-hour assay using a 100:1 ratio of PBMC to Bjab cells. The results shown in FIG. 4B indicated that 2H7scFv-Ig can mediate antibody dependent cellular cytotoxicity (ADCC) because the release of ⁵¹Cr was higher in the presence of both PBMC and 2H7scFv-Ig than in the presence of either PBMC or 2H7scFv-Ig alone.

### Example 3

[0242] Effect of Simultaneous Ligation of CD20 and CD40 on Growth of Normal B Cells, and on CD95 Expression, and Induction of Apoptosis

[0243] This example illustrates the effect of cross-linking of CD20 and CD40 expressed on the cell surface on cell proliferation.

[0244] Dense resting B cells were isolated from human tonsil by a Percoll step gradient and T cells were removed by E-rosetting. Proliferation of resting, dense tonsillar B cells was measured by uptake of ³[H]-thymidine during the last 12 hours of a 4-day experiment. Proliferation was measured in quadruplicate cultures with means and standard deviations as shown. Murine anti-human CD20 mAb 1F5 (anti-CD20) was used alone or was cross-linked with anti-murine κ mAb 187.1 (anti-CD20XL). CD40 activation was accomplished using soluble human CD154 fused with murine CD8 (CD154) (Hollenbaugh et al., EMBO J. 11: 4212-21 (1992)), and CD40 cross-linking was accomplished using anti-murine CD8 mAb 53-6 (CD154XL). This procedure allowed simultaneous cross-linking of CD20 and CD40 on the cell surface. The results are presented in FIG. 5.

[0245] The effect of CD20 and CD40 cross-linking on Ramos cells, a B lymphoma cell line, was examined. Ramos cells were analyzed for CD95 (Fas) expression and percent apoptosis eighteen hours after treatment (no goat anti-mouse IgG (GAM)) and/or cross-linking (+GAM) using murine mAbs that specifically bind CD20 (1F5) and CD40 (G28-5). Control cells were treated with a non-binding isotype control (64.1) specific for CD3.

[0246] Treated Ramos cells were harvested, incubated with FITC-anti-CD95, and analyzed by flow cytometry to determine the relative expression level of Fas on the cell surface after CD20 or CD40 cross-linking. Data is plotted as mean fluorescence of cells after treatment with the stimuli indicated (FIG. 6A).

[0247] Treated Ramos cells from the same experiment were harvested and binding of annexin V was measured to indicate the percentage apoptosis in the treated cultures. Apoptosis was measured by binding of Annexin V 18 hours after cross-linking of CD20 and CD40 using 1F5 and G28-5 followed by cross-linking with GAM. Binding of Annexin V was measured using a FITC-Annexin V kit (Catalog #PN-IM2376, Immunotech, Marseille, France,). Annexin V binding is known to be an early event in progression of cells into apoptosis. Apoptosis, or programmed cell death, is a process characterized by a cascade of catabolic reactions leading to cell death by suicide. In the early phase of apoptosis, before cells change morphology and hydrolyze DNA, the integrity of the cell membrane is maintained but cells lose the asymmetry of their membrane phospholipids, exposing negatively charged phospholipids, such as phosphatidylserine, at the cell surface. Annexin V, a calcium and phopholipid binding protein, binds preferentially and with high affinity to phosphatidylserine. Results demonstrating the effect of cross-linking both CD20 and CD40 on expression of the FAS receptor (CD95) are presented in FIG. 6B. The effect of cross-linking of both CD20 and CD40 on Annexin V binding to cells is shown in FIG. 6B.

### Example 4

[0248] Construction and Characterization of 2H7 scFv-CD154 Fusion Proteins

[0249] To construct a molecule capable of binding to both CD20 and CD40, cDNA encoding the 2H7 scFv was fused with cDNA encoding CD154, the CD40 ligand. The 2H7 scFv cDNA encoded on the HindIII-BclI fragment was removed from the 2H7 scFvIg construct, and inserted into a pD18 vector along with a BamHI-XbaI cDNA fragment encoding the extracellular domain of human CD154. The extracellular domain is encoded at the carboxy terminus of CD154, similar to other type II membrane proteins.

[0250] The extracellular domain of human CD154 was PCR amplified using cDNA generated with random primers and RNA from human T lymphocytes activated with PHA (phytohemagglutinin). The primer sets included two different 5′ or sense primers that created fusion junctions at two different positions within the extracellular domain of CD154. Two different fusion junctions were designed that resulted in a short or truncated form (form S4) including amino acids 108 (Glu)-261 (Leu)+(Glu), and a long or complete form (form L2) including amino acids 48 (Arg) -261 (Leu)+(Glu), of the extracellular domain of CD154, both constructed as BamHI-XbaI fragments. The sense primer which fuses the two different truncated extracellular domains to the 2H7scFv includes a BamHI site for cloning. The sense primer for the S4 form of the CD154 cDNA is designated SEQUENCE ID NO: 11 or CD154BAM108 and encodes a 34 mer with the following sequence: 5′-gtt gtc gga tcc aga aaa cag ctt tga aat gca a-3′, while the antisense primer is designated SEQUENCE ID NO: 12 or CD154XBA and encodes a 44 mer with the following sequence: 5′-gtt gtt tct aga tta tca ctc gag ttt gag taa gcc aaa gga cg-3′.

[0251] The oligonucleotide primers used in amplifying the long form (L2) of the CD154 extracellular domain encoding amino acids 48 (Arg)-261 (Leu)+(Glu), were as follows: The sense primer designated CD154 BAM48 (SEQUENCE ID NO:13) encoded a 35-mer with the following sequence: 5′-gtt gtc gga tcc aag aag gtt gga caa gat aga ag-3′. The antisense primer designated or CD154XBA (SEQUENCE ID NO:______) encoded the 44-mer: 5′-gtt gtt tct aga tta tca ctc gag ttt gag taa gcc aaa gga cg-3′. Other PCR reaction conditions were identical to those used for amplifying the 2H7 scFv (see Example 1). PCR fragments were purified by PCR quick kits (QIAGEN, San Diego, Calif.), eluted in 30 μl ddH₂O, and digested with BamHI and XbaI (Roche) restriction endonucleases in a 40 μl reaction volume at 37° C. for 3 hours. Fragments were gel purified, purified using QIAEX kits according to the manufacturer's instructions (QIAGEN), and ligated along with the 2H7 HindIII-BclI fragment into the pD18 expression vector digested with HindIII+XbaI. Ligation reactions were transformed into DH5-alpha chemically competent bacteria and plated onto LB plates containing 100 μg/ml ampicillin. Transformants were grown overnight at 37° C., and isolated colonies used to inoculate 3 ml liquid cultures in Luria Broth containing 100 μg/ml ampicillin. Clones were screened after mini-plasmid preparations (QIAGEN) for insertion of both the 2H7 scFv and the CD154 extracellular domain fragments.

[0252] The 2H7scFv-CD154 construct cDNAs were subjected to cycle sequencing on a PE 9700 thermocycler using a 25-cycle program that included denaturating at 96° C., 10 seconds, annealing at 50° C. for 5 seconds, and extension at 60° C, for 4 minutes. The sequencing primers used were pD18 forward (SEQ ID NO:______: 5′-gtctatataagcagagctctggc-3′) and pD18 reverse (SEQ ID NO:______: 5′-cgaggctgatcagcgagctctagca-3′) primers. In addition, an internal primer was used that had homology to the human CD154 sequence (SEQ ID NO:______: 5′-ccgcaatttgaggattctgatcacc-3′). Sequencing reactions included primers at 3.2 pmol, approximately 200 ng DNA template, and 8 μl sequencing mix. Sequencing reactions were performed using the Big Dye Terminator Ready Sequencing Mix (PE-Applied Biosystems, Foster City, Calif.) according to the manufacturer's instructions. Samples were subsequently purified using Centrisep columns (Princeton Separations, Adelphia, N.J.). The eluates were dried in a Savant speed-vacuum dryer, denatured in 20 μl template Suppression Reagent (ABI) at 95° C. for 2 minutes, and analyzed on an ABI 310 Genetic Analyzer (PE-Applied Biosystems). The sequence was edited, translated, and analyzed using Vector Nti version 6.0 (Informax, North Bethesda, Md.). The 2H7scFv-CD154 L2 cDNA sequence and predicted amino acid sequence is presented in FIG. 7A, and 2H7scFv-CD154 S4 cDNA sequence and predicted amino acid sequence is presented in FIG. 7B.

[0253] The binding activity of the 2H7 scFv-CD154 fusion proteins (SEQ. ID NO:______ and ______) to CD20 and CD40 simultaneously was determined by flow cytometry. The assay used CHO cell targets that express CD20. After a 45-minute incubation of CD20 CHO cells with supernatants from cells transfected with the 2H7 scFv-CD154 expression plasmid, the CD20 CHO cells were washed twice and incubated with biotin-conjugated CD40-Ig fusion protein in PBS/2% FBS. After 45 min, cells were washed twice and incubated with phycoerythrin (PE)-labeled strepavidin at 1:100 in PBS/2% FBS (Molecular Probes, Eugene Oreg.). After an additional 30 min incubation, cells were washed 2× and were analyzed by flow cytometry. The results show that the 2H7 scFv-CD154 molecule was able to bind to CD20 on the cell surface and to capture biotin-conjugated CD40 from solution (FIG. 8).

[0254] To determine the effect of the 2H7scFv-CD154 on growth and viability of B lymphoma and lymphoblastoid cell lines, cells were incubated with 2H7scFv-CD154 L2 (SEQ. ID NO:______) for 12 hours and then examined for binding of Annexin V. Binding of Annexin V was measured using a FITC-Annexin V kit (Immunotech, Marseille, France, Catalog #PN-IM2376). B cell lines were incubated in 1 ml cultures with dilutions of concentrated, dialyzed supernatants from cells expressing secreted forms of the 2H7scFv-CD154 fusion proteins. The results are presented in FIG. 9.

[0255] The growth rate of the Ramos B lymphoma cell line in the presence of 2H7scFv-CD154 was examined by uptake of ³H-thymidine for the last 6 hours of a 24-hour culture. The effect of 2H7scFv-CD154 on cell proliferation is shown in FIG. 10.

### Example 5

[0256] Construction and Characterization of CytoxB Antibody Derivatives

[0257] CytoxB antibodies were derived from the 2H7 scFv-IgG polypeptide. The 2H7 scFv (see Example 1) was linked to the human IgG1 Fc domain via an altered hinge domain (see FIG. 11). Cysteine residues in the hinge region were substituted with serine residues by site-directed mutagenesis and other methods known in the art. The mutant hinge was fused either to a wild-type Fc domain to create one construct, designated CytoxB-MHWTG1C, or was fused to a mutated Fc domain (CytoxB-MHMG1C) that had additional mutations introduced into the CH2 domain. Amino acid residues in CH2 that are implicated in effector function are illustrated in FIG. 11. Mutations of one or more of these residues may reduce FcR binding and mediation of effector functions. In this example, the leucine residue 234 known in the art to be important to Fc receptor binding, was mutated in the 2H7 scFv fusion protein, CytoxB-[MG1H/MG1C]. In another construct, the human IgG1 hinge region was substituted with a portion of the human IgA hinge, which was fused to wild-type human Fc domain (CytoxB-IgAHWTHG1C). (See FIG. 11). This mutated binge region allows expression of a mixture of monomeric and dimeric molecules that retain functional properties of the human IgG1 CH2 and CH3 domains. Synthetic, recombinant cDNA expression cassettes for these molecules were constructed and polypeptides were expressed in CHODG44 cells according to methods described in Example 2.

[0258] Purified fusion protein derivatives of CytoxB-scFvlg molecules were analyzed by SDS-PAGE according to the methods described in Example 2. Polyacrylamide gels were run under non-reducing and reducing conditions. Two different molecule weight marker sets, BioRad prestained markers, (BioRad, Hercules, Calif.) and Novex Multimark molecular weight markers were loaded onto each gel. The migration patterns of the different constructs and of Rituximab™ are presented in FIG. 12.

[0259] The ability of the different derivatives of CytoxB-scFvIg molecules to mediate ADCC was measured using the Bjab B lymphoma cells as the target and freshly prepared human PBMCs as effector cells. (See Example 2). Effector to target ratios were varied as follows: 70:1, 35:1, and 18:1, with the number of Bjab cells per well remaining constant but the number of PBMCs were varied. Bjab cells were labeled for 2 hours with ⁵¹Cr and aliquoted at a cell density of 5×10⁴ cells/well to each well of flat-bottom 96 well plates. Purified fusion proteins or rituximab were added at a concentration of 10 μg/ml to the various dilutions of PBMCs. Spontaneous release was measured without addition of PBMC or fusion protein, and maximal release was measured by the addition of detergent (1% NP-40) to the appropriate wells. Reactions were incubated for 4 hours, and 100 μl of culture supernatant was harvested to a Lumaplate (Packard Instruments) and allowed to dry overnight prior to counting cpm released. The results are presented in FIG. 13.

[0260] Complement dependent cytotoxicity (CDC) activity of the CytoxB derivatives was also measured. Reactions were performed essentially as described in Example 2. The results are presented in FIG. 14 as percent of dead cells to total cells for each concentration of fusion protein.

### Example 6

[0261] In vivo Studies in Macaques

[0262] Initial in vivo studies with CytoxB derivatives have been performed in nonhuman primates. FIG. 15 shows data characterizing the serum half-life of CytoxB in monkeys. Measurements were performed on serum samples obtained from two different macaques (J99231 and K99334) after doses of 6 mg/kg were administered to each monkey on the days indicated by arrows. For each sample, the level of 2H7scFvIg present was estimated by comparison to a standard curve generated by binding of purified CytoxB-(MHWTG1C)-Ig fusion protein to CD20 CHO cells (see Example 2). The data are tabulated in the bottom panel of the FIG. 15.

[0263] The effect of CytoxB-(MHWTG1C)Ig fusion protein on levels of circulating CD40+ cells in macaques was investigated. Complete blood counts were performed at each of the days indicated in FIG. 16. In addition, FACS (fluorescence activated cell sorter) assays were performed on peripheral blood lymphocytes using a CD40-specific fluorescein conjugated antibody to detect B cells among the cell population. The percentage of positive cells was then used to calculate the number of B cells in the original samples. The data are graphed as thousands of B cells per microliter of blood measured at the days indicated after injection (FIG. 16).

### Example 7

[0264] Construction and Expression of an anti-CD19 scFv-Ig Fusion Protein

[0265] An anti-CD19 scFv-Ig fusion protein was constructed, transfected into eukaryotic cells, and expressed according to methods presented in Examples 1, 2, and 5 and standard in the art. The variable heavy chain regions and variable light chain regions were cloned from RNA isolated from hybridoma cells producing antibody HD37, which specifically binds to CD19. Expression levels of a HD37scFv-IgAHWTG1C and a HD37scFv-IgMHWTG1C were measured and compared to a standard curve generated using purified HD37 scFvIg. The results are presented in FIG. 17.

### Example 8

[0266] Construction and Expression of an Anti-L6 scFv-Ig Fusion Protein

[0267] An scFv-Ig fusion protein was constructed using variable regions derived from an anti-carcinoma mAb, L6. The fusion protein was constructed, transfected into eukaryotic cells, and expressed according to methods presented in Examples 1, 2, and 5 and standard in the art. Expression levels of L6scFv-IgAHWTG1C and L6scFv-IgMHWTG1C were measured and compared to a standard curve generated using purified HD37 scFvIg. The results are presented in FIG. 18.

### Example 9

[0268] Characterization of Various scFv-Ig Fusion Proteins

[0269] In addition to the scFv-Ig fusion protein already described, G28-1 (anti-CD37) scFv-Ig fusion proteins were prepared essentially as described in Examples 1 and 5. The variable regions of the heavy and light chains were cloned according to methods known in the art. ADCC activity of 2H7-MHWTG1C, 2H7-IgAHWTG1C, G28-1-MHWTG1C, G28-1 IgAHWTG1C, HD37-MHWTG1C, and HD37- IgAHWTG1C was determined according to methods described above (see Example 2). Results are presented in FIG. 19. ADCC activity of L6scFv-IgAHWTG1C and L6scFv-IgMHWTG1C was measured using the 2981 human lung carcinoma cell line. The results are presented in FIG. 20. The murine L6 monoclonal antibody is known not to exhibit ADCC activity.

[0270] The purified proteins were analyzed by SDS-PAGE under reducing and non-reducing conditions. Samples were prepared and gels run essentially as described in Examples 2 and 5. The results for the L6 and 2H7 scFv-Ig fusion proteins are presented in FIG. 21 and the results for the G28-1 and HD37 scFv-Ig fusion proteins are presented in FIG. 22.

### Example 10

[0271] Construction and Expression of Anti-CD20 scFv-llama Ig Fusion Proteins

[0272] This Example illustrates the cloning of llama IgG1, IgG2, and IgG3 constant region domains and the construction of immunoglobulin fusion proteins with each of the three constant regions and anti-CD20 scFv.

[0273] The constant regions of llama IgG1, IgG2, and IgG3 immunoglobulins were cloned and inserted into mammalian vector constructs containing an anti-CD20 single chain Fv, 2H7 scFv. Total RNA was isolated from peripheral blood mononuclear cells (PBMC) from llama blood (Triple J Farms, Bellingham, Wash.) by lysing the lymphocytes in TRIzol® (Invitrogen Life Technologies, Carlsbad, Calif.) according to the manufacturer's instructions. One microgram (1 μg) of total RNA was used as template to prepare cDNA by reverse transcription. The RNA and 200 ng random primers were combined and denatured at 72° C. for 10 minutes prior to addition of enzyme. Superscript II reverse transcriptase (Invitrogen Life Technologies) was added to the RNA plus primer mixture in a total volume of 25 μl in the presence of 5×second strand buffer and 0.1 M DTT provided with the enzyme. The reverse transcription reaction was allowed to proceed at 42° C. for one hour. The cDNA was amplified by PCR using sequence specific primers. The 5′ primers were designed according to published sequences for the V_{HH} and V_{H} domains of camelids. The 3′ primer, which was used to amplify all three isotypes, was designed using mammalian CH3 domain sequences as a guide. The following specific primers were used. The Bcl and XbaI sites are indicated by underlined italicized sequences.

| | |
|---|---|
| 5′ primer for llama IgGI constant region | |
| LLG1-5′bgl: 5′-gtt gtt gat caa gaa cca cat gga gga tgc acg tg-3′ | (SEQ ID NO: ) |
| 5′ primer for llama IgG2 constant region | |
| LLG2-5′bgl: 5′-gtt gtt gat caa gaa ccc aag aca cca aaa cc-3′ | (SEQ ID NO: ) |
| 5′ primer for llama IgG3 constant region | |
| LLG3-5′bgl: 5′-gtt gtt gat caa gcg cac cac agc gaa gac ccc-3′ | (SEQ ID NO: ×) |
| 3′ primer for llama IgGi, IgG2, and IgG3 constant regions | |
| LLG123-3′X: 5′-gtt gtt tct aga tta cta ttt acc cga aga ctg ggt gat gga-3′ | (SEQ ID NO: ) |

[0274] PCR fragments of the expected size were cloned into TOPO® cloning vectors (Invitrogen Life Technologies) and then were sequenced. The sense sequencing primer, LLseqsense, had the sequence 5′-ctg aga tcg agt tca get g-3′ (SEQ ID NO:______), and the antisense primer, LLseqAS, had the sequence 5′-cct cct ttg get ttg tct c-3′ (SEQ ID NO:______. Sequencing was performed as described in Example 1. FIG. 23 compares the amino acid sequence of the three isotype llama constant regions containing the hinge, CH2, and CH3 domains with the amino acid sequence of human IgG1 hinge, CH2, and CH3 domains.

[0275] After verifying the sequence, the amplified PCR products were digested with restriction enzymes BclI and Xbal to create compatible restriction sites. The digested fragments were then gel-purified, and the DNA was eluted using a QIAquick Gel Extraction Kit (QIAGEN, Valencia, Calif.). The 2H7scFv-Ig pD18 mammalian expression vector construct (see Example 2) was digested with BclI and XbaI to remove the human IgG hinge, CH2, and CH3 domains. The pD18 vector is a modified derivative of pcDNA3 that contains an attenuated DHFR gene, which serves as a selectable marker for mammalian expression (Hayden et al., Tissue Antigens 48:242-54 (1996)). The purified llama IgG1, IgG2, and IgG3 constant region PCR products were ligated by T4 DNA ligase (Roche Molecular Biochemicals, Indianapolis, Ind.) into the double-digested 2H7 scFv-pD18 vector at room temperature overnight according to the manufacturer's instructions. After ligation, the ligation products were transformed into E. coli DH5α bacteria (BD Biosciences, Palo Alto, Calif.) and plated according to standard molecular biology procedures and manufacturer's instructions. Isolated colonies were chosen to screen for transformants containing the correct inserts.

[0276] For expression of the encoded polypeptides, plasmid DNA from positive clones was transiently transfected into COS-7 cells using DEAE-dextran (Hayden et al., Ther Immunol. 1:3-15 (1994)). COS-7 cells were seeded at approximately 3×10⁶ cells per 150 mm plate and grown overnight until the cells were about 75% confluent. Cells were then washed once with serum-free DMEM (Invitrogen Life Technologies, Grand Island, N.Y.). Transfection supernatant (10 ml) containing 400 μg/ml DEAE-dextran, 0.1 mM chloroquine, and 5 μg/ml of the DNA constructs were added to the cells, which were then incubated at 37° C. for 3-4 hrs. After incubation, cells were pulsed with 10 ml of 10% dimethyl sulfoxide (DMSO) in 1×PBS at room temperature for 2 minutes. Cells were then placed back into fully supplemented DMEM/10% FBS (1% L-glutamine, 1% penicillin/streptomycin, 1% sodium pyruvate, 1% MEM essential amino acids) (Invitrogen Life Technologies). After 24 hours, the media was replaced with serum-free fully supplemented DMEM (Invitrogen Life Technologies), and the cells were maintained up to 21 days with media changes every 3-4 days.

[0277] Ig-fusion proteins were purified by passing COS cell culture supernatants through Protein A Agarose (Repligen, Cambridge, Mass.) columns. After application of the culture supernatant, the Protein A columns were then washed with 1×PBS (Invitrogen Life Technologies). Bound Ig-fusion proteins were eluted with 0.1 M citric acid (pH 2.8), and the collected fractions were immediately neutralized with Tris base (pH 10.85). The fractions containing protein were identified by measuring the optical density (A₂₈₀) and then were pooled, dialyzed against 1×PBS, (Invitrogen Life Technologies) and filtered through a 0.2 μm filter.

[0278] The purified Ig-fusion proteins were analyzed by SDS-PAGE. Aliquots of 2H7 scFv-llama IgG1, 2H7 scFv-llama IgG2, 2H7 scFv-llama IgG3, and Rituxan® (Rituximab, anti-CD20 antibody, Genentech, Inc. and IDEC Pharmaceuticals Corp.) (provided by Dr. Oliver W. Press, Fred Hutchison Cancer Research Center, Seattle, Wash.) (5 μg protein) were combined with 25 μl 2×NuPAGE® SDS Sample Buffer (Invitrogen Life Technologies) (non-reduced samples). Samples of each protein were also prepared in reducing sample buffer containing 5% 2-mercaptoethanol (Sigma-Aldrich, St. Louis, Mo.). Molecular weight markers (Invitrogen Life Technologies) were applied to the gels in non-reducing buffer only. The proteins were fractionated on NuPAGE® 10% Bis-Tris gels (Invitrogen Life Technologies). After electrophoresis (approximately 1 hour), the gels were washed three times, five minutes each, with Distilled Water (Invitrogen Life Technologies) and then stained in 50 ml Bio-Safe Coommassie Stain (BioRad, Hercules, Calif.) overnight at room temperature. After a wash in Distilled Water, the gels were photographed. The migration pattern of each Ig-fusion protein is presented in FIG. 24.

[0279] The ability of the 2H7 scFv-llama Ig fusion proteins to bind to cells expressing CD20 was demonstrated by flow cytometry. Serial dilutions starting at 25 μg/ml of purified 2H7 scFv-llama IgG1, 2H7 scFv-llama IgG2, and 2H7 scFv-llama IgG3 were prepared and incubated with CD20-transfected (CD20+) CHO cells (from the laboratory of Dr. S. Skov, Institute of Medical Microbiology and Immunology, Copenhagen Denmark in 1% FBS 1×PBS media (Invitrogen Life Technologies) for one hour on ice. After the incubation, the cells were then centrifuged and washed with 1% FBS in 1×PBS. To detect bound 2H7 scFv-llama Ig, the cells were incubated for one hour on ice with fluorescein-conjugated goat anti-camelid IgG (heavy and light chain) (1:100) (Triple J Farms). The cells were then centrifuged and resuspended in 1% FBS-1×PBS and analyzed using a Coulter Epics XL cell sorter (Beckman Coulter, Miami, Fla.). The data (percent of maximum brightness) are presented in FIG. 25.

### Example 11

[0280] Effector Function of Anti-CD20 scFv-llama Ig Fusion Proteins

[0281] This Example demonstrates the ability of anti-CD20 llama IgG1, IgG2, and IgG3 fusion proteins to mediate complement dependent cytotoxicity (CDC) and antibody dependent cell-mediated cytotoxicity (ADCC).

[0282] The ability of the 2H7 scFv-llama IgG fusion proteins to kill CD20 positive cells in the presence of complement was tested using the BJAB human B cell line. Rabbit complement was obtained from 3-4 week old rabbits (Pel-Freez, Brown Deer, Wis.). BJAB cells (2×10⁶ cells/ml) were combined with rabbit complement (final dilution 1:10) and purified 2H7 Ig fusion proteins. 2H7 scFv-llama IgG1, 2H7 scFv-llama IgG2, 2H7 scFv-llama IgG3, and 2H7 scFv-human IgG1 wild type hinge-CH2-CH3) (Example 1) were added at 1:3 serial dilutions beginning at a concentration of 30 μg/ml. After one hour at 37° C., cell viability was determined by counting live and dead cells by trypan blue exclusion (0.4%) (Invitrogen Life Technologies) using a hemacytometer (Bright-line, Horsham, Pa.). The percent killing was calculated by dividing the number of dead cells by the number of total cells (dead+live cells). The data presented in FIG. 26 show that all Ig fusion proteins had CDC activity.

[0283] The ADCC activity of the 2H7 scFv-llama IgG fusion proteins was determined using BJAB cells as target cells and human or llama peripheral blood mononuclear cells (PBMC) as effector cells. BJAB cells were pre-incubated for approximately 2 hours with ⁵¹Cr (100 μCi) (Amersham Biosciences, Piscataway, N.J.) in fully supplemented IMDM (Invitrogen Life Technologies) containing 15% FBS. The cells were mixed intermittently during the pre-incubation period. Fresh, resting human PBMC were purified from whole blood using Lymphocyte Separation Media (LSM) (ICN Pharmaceuticals, New York, N.Y.). PBMC were combined with labeled BJAB cells (5×10⁴ cells per well of 96 well tissue culture plate) at ratios of 25:1, 50:1, and 100:1. To each combination was added 10 μg/ml of purified 2H7 scFv-llama IgG1, 2H7 scFv-llama IgG2, 2H7 scFv-llama IgG3, Rituximab, or no anti-CD20 antibody. The mixtures were incubated for 6 hours at 37° C. Supernatant from each reaction containing ⁵¹Cr released from lysed cells was collected onto a LumaPlate-96 filter plate (Packard, Meriden, Conn.), which was dried overnight. The amount of ⁵¹Cr was measured by a TopCount NXT plate reader (Packard). FIG. 27 shows that the 2H7 scFv-llama IgG2 fusion protein was the most effective llama fusion protein in mediating ADCC. Each data point represents the average measurement of triplicate wells.

[0284] ADCC activity was affected by the source of effector cells. Llama PBMC were isolated from llama blood (Triple J Farms) using LSM. Llama effector cells were added at the same ratios to BJAB target cells as described for the ADCC assay using human effector cells. The cells were combined with 10 μg/ml of purified 2H7 scFv-llama IgG1, 2H7 scFv-llama IgG2, 2H7 scFv-llama IgG3, Rituximab, or no anti-CD20 antibody. The results are presented in FIG. 28.

### Example 12

[0285] Construction and Characterization of scFv Ig Fusion Proteins Expressed on the Cell Surface

[0286] This Example describes a retroviral transfection system for ectopic surface expression of genetically engineered cell surface receptors composed of scFvs that bind costimulatory receptors. The Example also demonstrates the effector function of these various scFv Ig fusion proteins expressed on the surface of target cells.

[0287] The heavy and light chain variable regions were cloned from murine monoclonal antibodies specific for various costimulatory receptors, and single chain Fv constructs were prepared essentially as described in Example 1. Antibodies included 2H7, anti-human CD20; 40.2.220, anti-human CD40; 2E12, anti-human CD28; 10A8, anti-human CD152 (anti-CTLA-4); and 500A2, anti-murine CD3. The heavy chain and light chain variable regions of each antibody were cloned according to standard methods for cloning immunoglobulin genes and as described in Example 1. Single chain Fv constructs were prepared as described in Example 1 by inserting a nucleotide sequence encoding a (gly₄ser)₃ peptide linker between the VL region nucleotide sequence of 40.2.220, 2E12, 10A8, and 500A2, respectively (SEQ ID NOs:______, respectively) and the VH region nucleotide sequence of 40.2.220, 2E12, 10A8, and 500A2, respectively (SEQ ID NOs:______, respectively). The polypeptide sequence for VL of 40.2.220, 2E12, 10A8, and 500A2 are set forth in SEQ ID NOs:______, respectively, and the polypeptide sequence for VH of 40.2.220, 2E12, 10A8, and 500A2 are set forth in SEQ ID NOs:______, respectively. Each scFv polynucleotide (SEQ ID NOs:______ for 40.2.220, 2E12, 10A8, and 500A2, respectively) was then fused to human IgG1 mutant hinge (CCC→SSS) and mutant CH2 (proline to serine mutation at residue 238 (238 numbering according to EU nomenclature, Ward et al., 1995 Therap. Immunol. 2:77-94; residue 251 according to Kabat et al.) and wild type CH3 domains according to the methods described in Example 5 and 11. Each scFv mutant IgG1 fusion polynucleotide sequence was then fused in frame to sequences encoding the transmembrane domain and cytoplasmic tail of human CD80 (SEQ ID NO:______), such that when the fusion protein was expressed in the transfected cell, CD80 provided an anchor for surface expression of the scFv Ig fusion protein. cDNAs encoding the scFv-IgG-CD80 fusion proteins (SEQ ID NOs:______ for 40.2.220-, 2E12-, 10A8-, and 500A2-scFv-IgG-CD80, respectively) were inserted into the retroviral vector pLNCX (BD Biosciences Clontech, Palo Alto, Calif.) according to standard molecular biology procedures and vendor instructions. The scFv-Ig-CD80 cDNA was inserted between the 5′LTR-neomycin resistance gene-CMV promoter sequences and the 3′LTR sequence. The retroviral constructs were transfected into Reh, an acute lymphocytic leukemia cell line (ATCC CRL-8286). Transfected cells were screened to select clones that were expressing scFv-Ig fusion proteins on the cell surface.

[0288] CDC and ADCC assays were performed with the transfected Reh cells to determine if expression of the scFv-Ig polypeptides on the cell surface augmented effector cell function. Reh cells expressing anti-human CD152 scFv-mutant IgG-CD80 (SEQ ID NO:______); Reh anti-human CD28 scFv- mutant IgG-CD80 (SEQ ID NO:______); Reh anti-human CD28 scFv-mutant IgG-CD80 (SEQ ID NO:______); Reh anti-human CD40 scFv-mutant IgG-CD80 (SEQ ID NO:______); Reh anti-human CD20 scFv-mutant IgG-CD80 (SEQ ID NO:______) were combined with human PBMC (see Example 11) and rabbit complement (10 μg/ml) for one hour at 37° C. Untransfected Reh cells were included as a control. Viability of the cells was determined by trypan blue exclusion, and the percent of killed cells was calculated (see Example 11). FIG. 29 shows the effectiveness of the scFv-IgG-CD80 fusion proteins when expressed on the cell surface of tumor cells to mediate complement dependent cytotoxicity.

[0289] The same transfected Reh cells tested in the CDC assay plus Reh cells transfected with the polynucleotide construct that encodes anti-murine CD3-scFv-Ig-CD80 (SEQ ID NO:______) were analyzed for ADCC activity (see Example 11). Untransfected and transfected Reh cells were pre-labeled with ⁵¹Cr (100 μCi) (Amersham) for two hours at 37° C. Human PBMC served as effector cells and were added to the Reh target cells (5×10⁴ cells per well of 96 well plate) at ratios of 5:1, 2.5:1, and 1.25:1. After five hours at 37° C., culture supernatants were harvested and analyzed as described in Example 11. Percent specific killing was calculated according to the following equation: ((experiment release minus spontaneous release)/(maximum release minus spontaneous release))×100. The data are presented in FIG. 30. Each data point represents the average of quadruplicate samples.

[0290] Using the same procedures described above, the same results with other binding domains were obtained using the following monoclonal antibodies mAbs as sources of sFv: for CD20, 1F5 (Genbank AY 058907 and AY058906); for CD40, 2.36 and G28.5; for CD28, 9.3.

[0291] Cell surface expression of antibody binding domains is accomplished by fusing antibody scFvs to IgA hinge and constant regions and IgE hinge and constant regions. Polynucleotides encoding an anti-4-1BB scFv, 5B9 (anti-human 4-1BB) scFv, and 2e12 (anti-human CD40) fused to IgAH IgA T4 (four terminal CH3 residues deleted) fused to the CD80 transmembrane and cytoplasmic domains and IgE Fc regions are shown in SEQ ID NOs:______. The encoded polypeptides are shown in SEQ ID NOs:______.

### Example 13

[0292] Construction and Sequence of Human Ig Hinge-CH2-CH3 Mutants and 2H7 Variable Region Mutants

[0293] This Example describes construction of scFv fusion proteins containing mutant human IgG1 and IgA constant regions. This Example also describes construction of a 2H7 scFv mutant with a single point mutation in the variable heavy chain region. Mutations were introduced into variable and constant region domains according to methods described herein and known in the molecular biology arts. FIG. 31 presents nomenclature for the Ig constant region constructs.

[0294] The human IgG1 hinge region of the 2H7 scFv human IgG1 hinge-CH2-CH3 fusion proteins was mutated to substitute cysteine residues that in a whole immunoglobulin are involved in forming disulfide bonds between two heavy chain molecules. One mutant, 2H7 scFv fused to a human IgG1 hinge region in which all three cysteine residues were mutated to serine residues (MTH (SSS)), was prepared as described in Example 5 (designated in Example 5 as CytoxB-MHWTG1C (includes wild type IgG1 CH2 and CH3 domains)) (now referred to as 2H7 scFv MTH (SSS) WTCH2CH3) and comprises the polynucleotide sequence SEQ ID NO:______ encoding the polypeptide as set forth in SEQ ID NO______. The polynucleotide sequence encoding this mutant (SEQ ID NO:______) was used as a template to create mutant hinge regions in which the first two cysteine residues were substituted with serine residues (IgG MTH (SSC)). An oligonucleotide was designed to substitute the third serine residue with a cysteine and had the following sequence: 5′-gtt gtt gat cag gag ccc aaa tct tct gac aaa act cac aca tct cca ccg tgc cca gca cct g-3′ (HuIgGMHncs3, SEQ ID NO:______). A second mutant was prepared in which the mutant hinge had serine residues substituting the first and third cysteine residues (IgG MTH (SCS)). The sequence of the oligonucleotide to create this mutant was as follows: 5′-gtt gtt gat cag gag ccc aaa tct tct gac aaa act cac aca tgc cca ccg-3′ (HuIgGMHncs2, SEQ ID NO:______). A third mutant was prepared with cysteine residues substituted at the second and third positions (IgG MTH (CSS)), also using the IgG MTH (SSS) mutant as template, and an oligonucleotide having the sequence, 5′-gtt gtt gat cag gag ccc aaa tct tgt gac aaa act cac-3′ (HuIgGMHncs1, SEQ ID NO:______).

[0295] The oligonucleotides introducing the mutations into the hinge region were combined with template and a 3′ oligonucleotide containing an XbaI site (underlined and italicized) (5′-gtt gtt tct aga tca ttt acc egg aga cag gga gag get ctt ctg cgt gta g-3′ (SEQ ID NO:______)) to amplify the mutant hinge-wild type (WT)-CH2-CH3 sequences by PCR. The IgG MTH CSS and IgG MTH SCS mutant sequences were amplified for 25 cycles with a denaturation profile of 94° C., annealing at 52° C. for 30 seconds, and extension at 72° C. for 30 seconds. The IgG MTH SSC mutant sequence was amplified under slightly different conditions: denaturation profile of 94° C., annealing at 45° C. for 30 seconds, and extension at 72° C. for 45 seconds. The amplified polynucleotides were inserted into the TOPO® cloning vector (Invitrogen Life Technologies) and then were sequenced as described in Example 1 to confirm the presence of the mutation. pD18 vector containing 2H7 scFv was digested to remove the constant region sequences essentially as described in Example 10. The mutant hinge-wild type CH2-CH3 regions were inserted in frame into the digested vector DNA to obtain vectors comprising 2H7 scFv MTH (CSS) WTCH2CH3 encoding DNA (SEQ ID NO:______); 2H7 scFv MTH (SCS) WTCH2CH3 encoding DNA (SEQ ID NO:______); and 2H7 scFv MTH (SSC) WTCH2CH3 encoding DNA (SEQ ID NO:______).

[0296] A mutation of leucine to serine at position 11 in the first framework region of the heavy chain variable region (numbering according to Kabat et al., Sequences of Proteins of Immunological Interest, 5^{th} ed. Bethesda, Md.: Public Health Service, National Institutes of Health (1991)) was introduced into the 2H7 scFv MTH (SSS) WTCH2CH3 fusion protein (SEQ ID NO:______). The wild type leucine residue was substituted with serine by site-directed mutagenesis using the oligonucleotide Vhser11: 5′-gga ggt ggg agc tct cag gct tat cta cag cag tct ggg gct gag tcg gtg agg cc-3′ (SEQ ID NO:______). The 3′-primer for PCR was huIgG1-3′ having the sequence 5′-gtc tct aga cta tca ttt acc cgg aga cag-3′ (SEQ ID NO:______) (XbaI site underlined and italicized). After PCR amplification, the fragments were inserted into the TOPO® cloning vector and sequenced to confirm the presence of the VH11 leucine to serine mutation. The 2H7 scFv-IgG MTH (SSS) WTCH2CH3 encoding DNA was shuttled into the PSL1180 cloning vector (Pharmacia Biotech, Inc., Piscataway, N.J.). The construct PSLT1180-2H7 scFv-IgG MTH (SSS) WTCH2CH3 was digested with Sac and XbaI to remove the wild type VH domain and the hinge and CH2 and CH3 domains. The PCR product comprising the VH11 mutant was digested with Sac and XbaI and then inserted into the digested PSL1180 construct according to standard molecular biology procedures. The construct was then digested with Hind III and XbaI, and inserted into the mammalian expression vector pD18 (see methods described in Example 1 and Example 10). The mutant is designated 2H7 scFv VH11SER IgG MTH (SSS) WTCH2CH3 (FIG. 31). The polynucleotide sequence is provided in SEQ ID NO:______, and the encoded polypeptide sequence is provided in SEQ ID NO:______.

[0297] Four constructs containing IgA constant region domains were prepared. One construct contained wild type IgA hinge fused to human IgG1 CH2 and CH3 (IgAH IgG WTCH2CH3) (FIG. 31). Sequential PCR amplifications were performed to substitute the human IgG1 hinge of the 2H7 scFv construct with nucleotide sequences encoding the IgA hinge. The 5′ oligonucleotide primer (huIgA/Gchim5) for the first PCR reaction had the sequence, 5′-cca tct ccc tca act cca cct acc cca tct ccc tca tgc gca cct gaa ctc ctg-3′ (SEQ ID NO:______). The primer (huIgAhg-5′) for the second PCR reaction to add more IgA specific hinge sequence and add a BclI restriction enzyme site (italicized and underlined) had the sequence, 5′-gtt gtt gat cag cca gtt ccc tca act cca cct acc cca tct ccc caa ct-3′ (SEQ ID NO:______). The 3′ primer for both amplification steps was huIgG1-3′ having the sequence, 5′-gtc tct aga cta tca ttt acc cgg aga cag-3′ (SEQ ID NO:______). The sequence of the PCR product was confirmed by TOPO® cloning as described above. The gel-purified fragment was digested with BclI and XbaI and then inserted into the 2H7 scFv-pD18 vector that had been digested BclI and XbaI to remove all the IgG1 constant region domains. Ligation was performed as described in Example 10 to provide a mammalian expression vector comprising the nucleotide sequence (SEQ ID NO:______) encoding a 2H7 scFv IgA hinge-IgG1 CH2-CH3 polypeptide (SEQ ID NO:______).

[0298] A second pD18 mammalian expression vector was constructed that had a polynucleotide sequence (SEQ ID NO:______) that encoded a 2H7 scFv fused to wild type IgA hinge, CH2, and CH3 domains (SEQ ID NO:______). Human IgA constant regions sequences were obtained by using random primers to reverse transcribe total RNA isolated from human tonsil followed by PCR amplification of the cDNA using sequence specific primers, essentially as described in Example 10. Human IgA hinge-CH2-CH3 nucleotide sequence (SEQ ID NO:______) encoding the IgA-CH2-CH3 polypeptide (IgAH IgACH2CH3, FIG. 31) (SEQ ID NO:______) was amplified using the 5′ oligonucleotide huIgAhg-5′ (SEQ ID NO:(same as above ______) and a 3′ oligonucleotide huIgA3′ having the sequence, 5′-gtt gtt tct aga tta tca gta gca ggt gcc gtc cac ctc cgc cat gac aac-3′ (SEQ ID NO:______). Secretion of a 2H7-IgA hinge-IgA CH2-CH3 polypeptide from transfected mammalian cells required co-expression of human J chain that covalently binds to two IgA CH3 domains via disulfide bonds. Total RNA was isolated from tonsil B cells and was reversed transcribed to generate cDNA as described above. PCR amplification of the nucleotide sequence encoding the J chain was performed with J chain specific primers. The 5′ PCR primer, HUJCH5nl, had the sequence, 5′-gtt gtt aga tct caa gaa gat gaa agg att gtt ctt-3′ (SEQ ID NO:______), and sequence of the 3′ primer, HUJCH3, was 5′-gtt gtt tct aga tta gtc agg ata gca ggc atc tgg-3′ (SEQ ID NO:______). The cDNA was cloned into TOPO® for sequencing as described in Example 10. J chain encoding cDNA (SEQ ID NO:______) was then inserted into pD18 and pcDNA3-Hygro (+) (Invitrogen Life Technology) vectors for co-transfection with 2H7 scFv IgA hinge-CH2-CH3 constructs. The J chain has the predicted amino acid sequence set forth in SEQ ID NO:______.

[0299] Secretion of an scFv IgA constant region construct in the absence of J chain was accomplished by engineering a truncated CH3 domain with a deletion of the four carboxy terminal amino acids (GTCY, SEQ ID NO:______) (IgAH IgA-T4, FIG. 31), which include a cysteine residue that forms a disulfide bond with the J chain. The IgA hinge-CH2-CH3 nucleotide sequence containing the deletion in CH3 (SEQ ID NO:______) was prepared using a 5′ primer (huIgAhg-5′) having the sequence 5′-gtt gtt gat cag cca gtt ccc tca act cca cct acc cca tct ccc tca act-3′ (SEQ ID NO:______) (BclI site is underlined and italicized), and a 3′ PCR primer (HUIGA3T1) having the sequence 5′-gtt gtt tct aga tta tca gtc cac ctc cgc cat gac aac aga cac-3′ (SEQ ID NO:______). This mutated IgA constant region nucleotide sequence was inserted into a 2H7 scFv pD18 vector as described for the generation of the previous 2H7 scFv-Ig constructs (see Example 1 and this example) that comprises the polynucleotide sequence (SEQ ID NO:______) encoding a 2H7 IgAH IgA-T4 polynucleotide (SEQ ID NO:______).

[0300] A fourth construct was prepared that encoded a 2H7 scFv-IgA constant region fusion protein with a deletion of 14 additional amino acids, most of which are hydrophobic residues, from the carboxy terminus of IgA CH3. The 2H7 scFv-IgAH IgA-T4 encoding polynucleotide was used as template to engineer a deletion of the nucleotide sequence encoding PTHVNVSVVMAEVD (SEQ ID NO:______). The 5′ oligonucleotide primer had the sequence 5′-gtt gtt gat cag cca gtt ccc tca act cca cct acc cca tct ccc tca act-3′ (SEQ ID NO:______) (BclI site shown as underlined and italicized). The 3′ oligonucleotide sequence was 5′-gtt gtt tct aga tta tca ttt acc cgc caa gcg gtc gat ggt ctt-3′ (SEQ ID NO:______). The deleted IgA CH3 region was amplified by using the above oligonucleotides to amplify the IgA constant region from RNA isolated from human tonsil such that the cDNA contained the deleted carboxyl terminal encoding region for the 18 amino acids. The IgAH IgA-T18 constant region was inserted into a 2H7 scFv pD18 vector that comprises the polynucleotide sequence (SEQ ID NO:______) encoding a 2H7 IgAH IgA-T18 polynucleotide (SEQ ID NO:______) as described above.

### Example 14

[0301] Effector Function of CTLA-4 IgG Fusion Proteins

[0302] The Example compares the effector functions of CTLA-4 Ig fusion proteins in CDC and ADCC assays.

[0303] Two CTLA-4 IgG fusion proteins were constructed. One fusion protein comprises the extracellular domain of CTLA-4 fused to human IgG1 wild type hinge, CH2, and CH3 domains and is designated CTLA-4 IgG WTH (CCC) WTCH2CH3 (SEQ ID NO:______). A pD18 mammalian expression vector comprising a polynucleotide sequence encoding CTLA-4 IgG WTH (CCC) WTCH2CH3 (SEQ ID NO:______) was prepared by fusing in frame the nucleotide sequence encoding the extracellular domain of CTLA-4 (SEQ ID NO:______) (see U.S. Pat. No. 5,844,095) to the nucleotide sequence encoding IgG WTH (CCC) WTCH2CH3 (SEQ ID NO:______) according to the methods described in Examples 1 and 10. The extracellular domain nucleotide sequence also comprises a BclI restriction enzyme site at the 3′ end, and a leader peptide nucleotide sequence (SEQ ID NO:______) that encodes an oncoM leader peptide (SEQ ID NO:______). A second CTLA-4 IgG fusion protein, designated CTLA-4 IgG MTH (SSS) MTCH2WTCH3, contained the extracellular domain of CTLA-4 (plus the oncoM leader peptide sequence) fused to a mutant IgG hinge in which all three cysteine residues were replaced with serine residues. The hinge region was fused to a mutant IgG1 CH2 domain that had a mutation at isotype position 238 (EU numbering, Ward et al., supra, (position 251 using numbering according to Kabat et al., supra; position 209 where numbering commences with first residue of IgG1 CH1; i.e., PAPELLDGPS (SEQ ID NO:______) of wild type IgG1 CH2 is modified to PAPELLDGSS (SEQ ID NO:______)), which was fused to IgG1 wild type CH3 (U.S. Pat. No. 5,844,095). The CTLA-4 IgG MTH (SSS) MTCH2WTCH3 polynucleotide comprises the nucleotide sequence in SEQ ID NO:______ and the deduced amino acid sequence comprises the sequence provided in SEQ ID NO:______. CTLA-4 fusion proteins were also prepared using CTLA-4 extracellular membrane encoding sequences without the leader peptide (SEQ ID NO:______).

[0304] To measure CDC activity, purified CTLA-4 IgG WTH (CCC) WTCH2CH3 (2 μg/ml) or CTLA-4 IgG MTH (SSS) MTCH2WTCH3 (2 μg/ml) was added to Reh cells (see Example 12) and to Reh cells transfected with the costimulatory molecule CD80 such that CD80 was expressed on the cell surface (Reh CD80.10, obtained from Dr. E. Clark, University of Washington, Seattle, Wash.; see Doty et al., 1998 J. Immunol. 161:2700; Doty et al., 1996 J. Immunol. 157:3270), in the presence or absence of rabbit complement (10 μg/ml). Purified CTLA Ig fusion proteins were prepared from culture supernatants of transiently transfected COS cells according to methods described in Example 10. The assays were performed essentially as described in Example 11 and 12. The data presented in FIG. 32 show that only CD80-transfected Reh cells were killed in the presence of complement and CTLA-4 IgG WTH (CCC) WTCH2CH3 fusion protein.

[0305] The purified CTLA-4 Ig fusion proteins were also tested in ADCC assays. Human PBMC, serving as effector cells, were added to Reh or Reh CD80.1 target cells at a ratio of 1.25:1, 2.5:1, 5.0:1, and 10:1. Cells were labeled and the assays performed essentially as described in Examples 11 and 12. The results are presented in FIG. 33. Each data point represents the average of four independent culture wells at each effector:target cell ratio. The data show that only CTLA-4 IgG WTH (CCC) WTCH2CH3 mediated significant ADCC of Reh CD80.10 cells.

### Example 15

[0306] Effector Function of CTLA-4 IgA Fusion Proteins

[0307] CTLA-4 IgA fusion proteins are prepared as described for the IgG fusion proteins (see Examples 1, 13, and 14). CTLA-4 extracellular domain nucleotide sequence (SEQ ID NO:______) is fused in open reading frame to nucleotides encoding IgAH IgACH2CH3 (SEQ ID NO:______) to provide the nucleotide sequence (SEQ ID NO:______) encoding a CTLA-4 IGAH IgACH2CH3 fusion protein (SEQ ID NO:______). The fusion protein is transiently expressed in COS cells (see Example 10) or stably expressed in CHO cells (see Example 1). Secretion of the CTLA-4 IgAH IgACH2CH3 fusion protein requires co-transfection with a construct containing a polynucleotide sequence (SEQ ID NO:______) that encodes human J chain (SEQ ID NO:______). The CTLA-4 IgAH IgACH2CH3 fusion protein is isolated as described in Examples 10 and 14. To express a CTLA-4 IgA construct without the presence of J chain, a CTLA-4 IgAH IgA-T4 construct is prepared and transfected into mammalian cells. In a similar manner as described for the CTLA-4 extracellular fragment fused to wild type IgA hinge-CH2CH3, the CTLA-4 extracellular domain nucleotide sequence (SEQ ID NO:______) is fused in open reading frame to a nucleotide sequence (SEQ ID NO:______) encoding a IgAH IgA-T4 polypeptide (SEQ ID NO:______) to provide a nucleotide sequence comprising SEQ ID NO:______ encoding a CTLA-4 IgAH IgA-T4 polypeptide (SEQ ID NO:______). Effector function of each construct is evaluated by CDC and ADCC as described in Example 14.

### Example 16

[0308] Binding of Anti-CD20 scFv Human Ig Fusion Proteins to CHO Cells Expressing CD20

[0309] This Example describes binding of 2H7 scFv Ig fusion proteins to CHO cells that express CD20. The analysis was performed by flow cytometry. Culture supernatants were collected from transiently transfected COS cells expressing 2H7 scFv IgG WTH (CCC) WTCH2CH3 (SEQ ID NO:______); 2H7 scFv IgG MTH (CSS) WTCH2CH3 (SEQ ID NO:______); 2H7 scFv IgG MTH (SCS) WTCH2CH3 (SEQ ID NO:______); and 2H7 scFv VHSER11 WTH WTCH2CH3 (SEQ ID NO:______), and two-fold serial dilutions were prepared. Serial two-fold dilutions of purified 2H7 scFv IgG MTH (SSC) WTCH2CH3 (SEQ ID NO:______) were prepared starting at a concentration of 5 μg/ml. The culture supernatants and purified fusion protein samples were incubated with (CD20+) CHO cells for one hour on ice. The cells were washed twice and then incubated with 1:100 FITC-conjugated goat anti-human IgG (CalTag) for 40 minutes. The unbound conjugate was then removed by washing the cells and flow cytometry analysis was performed using a Coulter Epics XL cell sorter. Results are presented in FIG. 34.

### Example 17

[0310] Immunoblot Analysis of Anti-CD20 scFv Human IgG and IgA Fusion Proteins

[0311] This Example describes immunoblot analysis of 2H7 scFv IgG and 2H7 scFv IgA fusion proteins that were immunoprecipitated from transfected cell culture supernants.

[0312] COS cells were transiently transfected with plasmids comprising nucleotide sequences for 2H7 scFv IgG WTH (CCC) WTCH2CH3 (SEQ ID NO: ); 2H7 scFv IgG MTH (CSS) WTCH2CH3 (SEQ ID NO: ); 2H7 scFv IgG MTH (SCS) WTCH2CH3 (SEQ ID NO: ); 2H7 scFv IgA H IgG WTCH2CH3 (SEQ ID NO: ); and scFv IgG MTH (SSS) WTCH2CH3 (SEQ ID NO: ) essentially according to the method described in Example 10. Cells were also transfected with vector only. After 48-72 hours at 37° C., cell culture supernatants were harvested and combined with protein A-agarose beads (Repligen) for one hour at 4° C. The beads were centrifuged and washed several times in TNEN [20 mM Tris base, 100 mM NaCl, 1 mM EDTA, and 0.05% NP-40, pH 8.0). The immunoprecipitates were combined with 25 μl 2×NuPAGE® SDS Sample Buffer (Invitrogen Life Technologies) (non-reduced samples). The proteins were fractionated on NuPAGE® 10% Bis-Tris gels (Invitrogen Life Technologies). After electrophoresis (approximately 1 hour), the proteins were transferred from the gel onto a Immobilon P polyvinylidene fluoride (PVDF) membrane (Millipore, Bedford, Mass.) using a semi-dry blotter (Ellard Instrumentation, Monroe, Wash.). The PVDF membrane was blocked in PBS containing 5% nonfat milk and then probed with HRP-conjugated goat anti-human IgG (Fc specific) (CalTag). After washing the immunoblot several times in PBS, the blot was developed using ECL (Amersham Biosciences). The results are shown in FIG. 35.

### Example 18

[0313] Binding of Anti-CD20 scFv Human IgA Fusion Proteins to CD20+ CHO Cells

[0314] This Example describes flow immunocytofluorimetry analysis of binding of 2H7 scFv IgAH IgACH2CH3 (SEQ ID NO:______) and 2H7 scFv IgAH IgAT4 (SEQ ID NO:______) fusion proteins to (CD20+) CHO cells.

[0315] COS cells were transiently co-transfected as described in Example 10 with plasmid DNA comprising a polynucleotide sequence (SEQ ID NO:______) encoding 2H7 scFv IgAH IgACH2CH3 polypeptide (SEQ ID NO:______) and with a separate plasmid comprising a polynucleotide sequence (SEQ ID NO:_______) encoding a human J chain polypeptide (SEQ ID NO:______). COS cells were also transfected with a polynucleotide sequence (SEQ ID NO:______) encoding a 2H7 scFv IgA fusion protein that had a deletion of four amino acids at the carboxy terminus of CH3 (2H7 scFv IgAH IgA-T4, SEQ ID NO:______). The transfections were performed as described in Example 10. Culture supernatants from transfected COS cells were combined with (CD20+) CHO cells (see Example 1) and incubated for one hour on ice. The cells were washed twice with PBS-2%FBS and then combined with FITC-conjugated goat anti-human IgA chain (CalTag) (1:100) for 40 minutes. The cells were again washed and then analyzed by flow cytometry using a Coulter Epics XL cell sorter. FIG. 36 shows that co-transfection with J chain was not required for secretion of 2H7 scFv IgAH IgAT4, the 2H7 IgA fusion protein with the truncated CH3 carboxy end (SEQ ID NO:______).

### Example 19

[0316] Effector Function of Anti-CD20 scFv Human IgA Fusion Proteins

[0317] This Example illustrates ADCC activity of 2H7 IgG and IgA fusion proteins against cells that express CD20. BJAB cells were prelabeled with ⁵¹Cr (100 μCi) (Amersham) for two hours at 37° C. Effector cells were obtained from fresh, resting human whole blood, which was diluted in an equal volume of Alsever's solution to prevent coagulation. 2H7 scFv IgG MTH (SSS) WTCH2CH3 (SEQ ID NO:______); 2H7 scFv IgG MTH (SCS) WTCH2CH3 (SEQ ID NO:______); 2H7 scFv IgG WTH (CCC) WTCH2CH3 (SEQ ID NO:______); and 2H7 scFv IgAH IgACH2CH3 (SEQ ID NO:______) fusion proteins were purified from transiently transfected COS cell supernatants (100-200 ml) by protein A chromatography as described in Example 10. COS cells transfected with the plasmid encoding 2H7 scFv IgAH IgACH2CH3 were co-transfected with a plasmid encoding human J chain as described in Example 18. Two-fold serial dilutions of the purified 2H7 Ig fusion proteins starting at 5 μg/ml were added to the labeled BJAB cells (5×10⁴ cells per well of 96 well tissue culture plate) in the presence of whole blood (100 μl of whole blood diluted 1:1 in Alsever's solution, final dilution 1:4) and incubated for five hours at 37° C. Culture supernatants were harvested and analyzed as described in Example 11. Percent specific killing was calculated according to the following equation: ((experiment release minus spontaneous release)/(maximum release minus spontaneous release))×100. The data are presented in FIG. 37. Each data point represents the average of quadruplicate samples.

[0318] In a second ADCC assay, the number of labeled BJAB target cells was held constant in each sample, and whole blood was added at dilutions of 0.25, 0.125, and 0.0625. Purified 2H7 IgG and IgA fusion proteins were added at a concentration of 5 μg/ml. The BJAB cells, whole blood, and fusion proteins were incubated, the supernatants harvested, and the percent specific killing was calculated as described above. Percent specific killing for each of the 2H7 fusion proteins is presented in FIG. 38.

[0319] The ADCC activity of purified 2H7 scFv IgG MTH (SSS) WTCH2CH3 (5 μg/ml) and of purified 2H7 scFv IgAH IgACH2CH3 (5 μg/ml) was compared in the presence of different effector cell populations. PBMC were isolated from whole blood as described in Examples 11 and 12. PBMC were combined with labeled BJAB target cells (5×10⁴ per well of 96 well tissue culture plate) at ratios of 50:1, 25:1, and 12.5:1. The assay was performed and the data analyzed as described above. FIG. 39A shows that only the 2H7 scFv IgG MTH (SSS) WTCH2CH3 fusion protein had ADCC activity when PBMC served as the effector cells. FIG. 39B shows that both 2H7 scFv IgG MTH (SSS) WTCH2CH3 and 2H7 scFv IgAH IgACH2CH3 exhibit ADCC activity when whole blood was the source of effector cells (as illustrated in FIG. 38).

### Example 20

[0320] Expression Level of 2H7 scFv VH11Ser IgG MTH (SSS) WTCH2CH3 Fusion Protein

[0321] This Example compares the expression level of 2H7 scFv VH11Ser IgG MTH (SSS) WTCH2CH3 fusion protein (SEQ ID NO:______) with other 2H7 scFv IgG constructs that do not contain the mutation in the variable heavy chain domain. The mammalian expression vector pD18 comprising nucleotide sequences 2H7 scFv IgG MTH (SSS) WTCH2CH3 (SEQ ID NO:______); 2H7 scFv IgG MTH (CSS) WTCH2CH3 (SEQ ID NO:______); 2H7 scFv IgG MTH (SCS) WTCH2CH3 (SEQ ID NO:______); 2H7 scFv IgG WTH (CCC) WTCH2CH3 (SEQ ID NO:______ ); and 2H7 scFv VHSER11 IgG MTH (SSS) WTCH2CH3 (see Examples 1 and 13) were transiently transfected into COS cells as described in Example 10. After 72 hours at 37° C., culture supernatants were harvested, and 1 μl of each supernatant was combined with non-reducing sample buffer (see method described in Example 10). The culture supernatant samples and aliquots of purified 2H7 scFv IgG MTH (SSS) WTCH2CH3 (40 ng, 20 ng, 10 ng/5 ng, and 2.5 ng) were fractionated on 10% Bis-Tris (MOPS) NuPAGE® gels (Invitrogen Life Technologies). Multimark® protein standards (Invitrogen Life Technologies) were also separated on the gel. The proteins were transferred to a PDVF membrane and immunoblotted as described in Example 17. The immunoblot is presented in FIG. 40. The amounts of the fusion proteins were quantified by densitometry analysis of the blots using the ScionImage for Windows software and comparison with the standard curve. The 2H7 scFv IgG WTH (CCC) WTCH2CH3 construct produced approximately 12 ng/ul or 12 micrograms/ml, the 2H7 scFv IgG MTH (CSS) WTCH2CH3 produced approximately 10 ng/ul or 10 micrograms/ml, the 2H7 scFv IgG MTH (SCS) WTCH2CH3 construct produced approximately 1 ng/ul or 1 microgram/ml, and the 2H7 scFv VHSER11 IgG MTH (SSS) WTCH2CH3 construct produced approximately 30 ng/ml or 30 micrograms/ml.

### Example 21

[0322] Construction of a 2H7 scFv IgG Fusion Protein with a Mutant CH3 Domain

[0323] Amino acid mutations were introduced into the CH3 domain of a 2H7 IgG fusion protein. The pD18 vector comprising 2H7 scFv IgG MTH (SSS) WTCH2CH3 (SEQ ID NO:______) was digested with BclI and XbaI to remove the MTH WTCH2CH3 (SEQ ID NO:______) fragment, which was then subcloned into pShuttle vector (BD Biosciences Clontech, Palo Alto, Calif.) that was double-digested with BclI and XbaI. Subcloning was performed in a kanamycin resistant vector because the ampicillin resistance gene has an XmnI site, which is required for this cloning procedure. Five constructs were prepared with the following substitutions: (1) a phenylalanine residue at position 405 (numbering according to Kabat et al. supra) was substituted with tyrosine using the oligonucleotide CH3Y405; (2) the phenylalanine position at 405 was substituted with an alanine residue using the oligonucleotide CH3A405; (3) the tyrosine residue at position 407 was substituted with an alanine using the oligonucleotide CH3A407; (4) both wild type amino acids at positions 405 and 407 were substituted with tyrosine and alanine, respectively using the oligonucleotide CH3Y405A407; and (5) both wild type amino acids at positions 405 and 407 were substituted with alanine using the oligonucleotide CH3A405A407. The oligonucleotides were the 3′ primers for PCR amplification of a portion of the CH3 domain. The nucleotide sequences for each 3′ oligonucleotide were as follows.

| | | |
|---|---|---|
| CH3Y405: | 5′-gtt gtt gaa gac gtt ccc ctg ctg cca cct gct ctt gtc cac ggt gag ctt gct | (SEQ ID NO: ) |
| gta gag gta gaa gga gcc-3′ | | |
| CH3A405: | 5′-gtt gtt gaa gac gtt ccc ctg ctg cca cct gct ctt gtc cac ggt gag ctt gct | (SEQ ID NO: ) |
| gta gag ggc gaa gga gcc-3′ | | |
| CH3A407: | 5′-gtt gtt gaa gac gtt ccc ctg ctg cca cct gct ctt gtc cac ggt gag ctt gct | (SEQ ID NO: ) |
| ggc gag gaa gaa gga gcc-3′ | | |
| CH3Y405A407: | 5′-gtt gtt gaa gac gtt ccc ctg ctg cca cct gct ctt gtc cac ggt gag | (SEQ ID NO: ) |
| ctt gct ggc gag gta gaa gga gcc-3′ | | |
| CH3A405A407: | 5′-gtt gtt gaa gac gtt ccc ctg ctg cca cct gct ctt gtc cac ggt gag | (SEQ ID NO: ) |
| ctt gct ggc gag ggc gaa gga gcc-3′ | | |

[0324] The template was the mutant hinge MHWTCH2CH3 human IgG1. The 5′ PCR oligonucleotide primer was huIgGMHWC, [SEQ ID NO:______]. The amplified products were TOPO® cloned and sequenced as described in Examples 1 and 10. DNA from the clones with the correct sequence was digested with BclI and XmnI and transferred to pShuttle containing the MTH WTCH2CH3 sequence, which was also digested with the same restriction enzymes. The mutated IgG sequences were then removed by digestion with BclI and XbaI and inserted into a pD18 vector containing 2H7 scFv that was also digested with BclI and XbaI. The polynucleotide sequences for mutated the CH3 domains, MTCH3 Y405, MTCH3 A405, MTCH3 A407, MTCH3 Y405A407, and MTCH3 A405A407 are shown in SEQ ID NOs:______, respectively, and the polypeptide sequences for each are shown in SEQ ID NOs:______, respectively. The polynucleotide sequences for the 2H7 scFv MTH WTCH2 MTCH3 Y405, 2H7 scFv MTH WTCH2 MTCH3 A405, scFv MTH WTCH2 MTCH3 A407, scFv MTH WTCH2 MTCH3 Y405A407, and scFv MTH WTCH2 MTCH3 A405A407, respectively, and the deduced amino acid sequences are shown in SEQ ID NOs:______, respectively.

### Example 22

[0325] Construction of 2H7 scFv IgG Fusion Proteins with Hinge Mutations

[0326] A 2H7 scFv IgG fusion protein was constructed with the third cysteine residue in the IgG1 hinge region substituted with a serine residue. The template for introduction of the mutations was a polynucleotide encoding 2H7 scFv WTH WTCH2CH3 (SEQ ID NO:______). The oligonucleotide introducing the mutations was a 5′ PCR primer oligonucleotide HIgGMHcys3 having the sequence 5′-gtt gtt gat cag gag ccc aaa tct tgt gac aaa act cac aca tgt cca ccg tcc cca gca cct-3′. The oligonucleotide introducing the mutation into the hinge region was combined with template and a 3′ oligonucleotide containing an XbaI site (underlined and italicized) (5′-gtt gtt tct aga tca ttt acc cgg aga cag gga gag gct ctt ctg cgt gta g-3′ (SEQ ID NO:______)) to amplify the mutant hinge-wild type (WT)-CH2-CH3 sequences by PCR. The IgG MTH CCS mutant sequence was amplified for 30 cycles with a denaturation profile of 94° C., annealing at 50° C. for 30 seconds, and extension at 72° C. for 30 seconds. The amplified polynucleotides were inserted into the TOPO® cloning vector (Invitrogen Life Technologies) and then were sequenced as described in Example 1 to confirm the presence of the mutation. pD18 vector containing 2H7 scFv was digested to remove the constant region sequences essentially as described in Example 10. The mutant hinge-wild type CH2-CH3 regions were inserted in frame into the digested vector DNA to obtain vectors comprising 2H7 scFv MTH (CCS) WTCH2CH3 encoding DNA (SEQ ID NO:______). The deduced polypeptide sequence is shown in SEQ ID NO:______.

### Example 23

[0327] Construction of Anti-CD20 IgE Fusion Proteins

[0328] A binding domain is fused to IgE constant region sequences such that the expressed polypeptide is capable of inducing an allergic response mechanism. The single chain Fv nucleotide sequence of 40.2.220 (SEQ ID NO:______), an anti-CD40 antibody, is fused to IgE CH2-CH3-CH4 according to methods described for other scFv immunoglobulin constant region constructs (see Examples 1, 5, 10, and 13). To PCR amplify the IgE CH2-CH3-CH4 domains, a 5′ oligonucleotide primer, hIgE5Bcl, having the sequence 5′-gtt gtt gat cac gtc tgc tcc agg gac ttc acc cc-3′, and a 3′ oligonucleotide primer, hlgE3stop, having the sequence 5′-gtt gtt tct aga tta act ttt acc ggg att tac aga cac cgc tog ctg g-3′ are used.

[0329] The retroviral transfection system for ectopic surface expression of genetically engineered cell surface receptors composed of scFvs that bind costimulatory receptors described in Example 12 is used to construct a 40.2.220 scFv IgE-CD80 fusion protein. The 40.2.220 scFv IgE fusion polynucleotide sequence is fused in frame to sequences encoding the transmembrane domain and cytoplasmic tail of human CD80 (SEQ ID NO:______), such that when the fusion protein is expressed in the transfected cell, CD80 provided an anchor for surface expression of the scFv Ig fusion protein. cDNA encoding the anti-CD40 scFv-IgE-CD80 fusion proteins (SEQ ID NO:______) is inserted into the retroviral vector pLNCX (BD Biosciences Clontech) according to standard molecular biology procedures and vendor instructions. The 40.2.220 scFv-Ig-CD80 cDNA is inserted between the 5′LTR-neomycin resistance gene-CMV promoter sequences and the 3′LTR sequence. The retroviral constructs are transfected into a carcinoma cell line, and transfected cells are screened to select clones that are expressing the 40.2.220 scFv-Ig-CD80 fusion protein on the cell surface.

### Example 24

[0330] Construction of IgA-T4 Mutants that are Expressed on the Cell Surface

[0331] The retroviral transfection system for ectopic surface expression of genetically engineered cell surface receptors composed of scFvs that bind costimulatory receptors described in Example 12 is used to construct a 2H7 scFv IgA hinge IgA-T4-CD80 fusion protein. The 2H7 scFv IgAH IgA-T4 fusion polynucleotide sequence (SEQ ID NO:______) is fused in frame to sequences encoding the transmembrane domain and cytoplasmic tail of human CD80 (SEQ ID NO:______), such that when the fusion protein is expressed in the transfected cell, CD80 provided an anchor for surface expression of the scFv Ig fusion protein. cDNA encoding the 2H7 scFv IgAH IgA-T4-CD80 fusion protein (SEQ ID NO:______) is inserted into the retroviral vector pLNCX (BD Biosciences Clontech) according to standard molecular biology procedures and vendor instructions. The 2H7 scFv IgAH IgA-T4-CD80 cDNA is inserted between the 5′LTR-neomycin resistance gene-CMV promoter sequences and the 3′LTR sequence. The retroviral construct is transfected into Reh, an acute lymphocytic leukemia cell line (ATCC CRL-8286). Transfected cells are screened to select clones that are expressing 2H7 scFv-Ig fusion proteins on the cell surface.

### Example 25

[0332] Characterization of an Anti-4-1BB scFv Ig-CD80 Fusion Protein Expressed on the Cell Surface of Tumor Cells and Growth of the Tumor Cells in Vivo

[0333] This example describes construction of an anti-murine 4-1BB (CD137) scFv fusion protein that has an IgG wild type hinge and CH2 and CH3 domains that is fused to the CD80 transmembrane and cytoplasmic domains. The Example also illustrates the effect of the cell surface expression of the anti-4-1BB scFv IgG CD80 polypeptide when the transfected tumor cells are transplanted into mice.

[0334] The heavy and light chain variable regions of a rat anti-4-1BB (CD137) monoclonal antibody (1D8) were cloned, and a single chain Fv construct was prepared essentially as described in Example 1. The heavy chain and light chain variable regions of each antibody were cloned according to standard methods for cloning immunoglobulin genes and as described in Example 1. Aingle chain Fv construct was prepared as described in Example 1 by inserting a nucleotide sequence encoding a (gly₄ser)₃ peptide linker between the VL region nucleotide sequence of 1D8 (SEQ ID NO:______) and the VH region nucleotide sequence of 1D8 (SEQ ID NO:______). The polypeptide sequence for 1D8 VL is shown in SEQ ID NO:______), and the polypeptide sequence for the VH domain is shown in SEQ ID NO:______). The scFv polynucleotide (SEQ ID NO:______) was then fused to human IGG1 wild-type hinge-CH2-CH3 domains according to the methods described in Example 1. The scFv IgG1 fusion polynucleotide sequence was then fused in frame to sequences encoding the transmembrane domain and cytoplasmic tail of human CD80 (SEQ ID NO:______) essentially as described in Example 12, such that when the fusion protein was expressed in the transfected cell, CD80 provided an anchor for surface expression of the scFv Ig fusion protein. cDNA encoding the scFv-IgG-CD80 fusion protein (SEQ ID NO:______) was inserted into the retroviral vector pLNCX (BD Biosciences Clontech) according to standard molecular biology procedures and vendor instructions. The scFv-Ig-CD80 cDNA was inserted between the 5′LTR-neomycin resistance gene-CMV promoter sequences and the 3′LTR sequence.

[0335] The retroviral constructs were transfected into the metastatic M2 clone of K1735, a melanoma cell line, provided by Dr. I. Hellstrom, PNRI, Seattle, Wash. Transfected cells were screened to select clones that were expressing scFv-Ig fusion proteins on the cell surface. To demonstrate that the 1D8 scFv IgG-CD80 construct was expressed on the cell surface of the tumor cells, the transfected cells were analyzed by flow immunocytofluorimetry. Transfected cells (K1735-1D8) were incubated for one hour on ice in phycoerythrin-conjugated F(ab′)₂ goat anti-human IgG. The unbound conjugate was then removed by washing the cells and flow cytometry analysis was performed using a Coulter Epics XL cell sorter. Results are presented in FIG. 41A.

[0336] The growth of K1735-1D8 transfected cells was examined in vivo. K1735-WT cells grew progressively when transplanted subcutaneously (s.c.) in naïve C3H mice. Although the same dose of K1735-1D8 cells initially formed tumors of an approximately 30 mm² surface area, the tumors started to regress around day 7 and had disappeared by day 20 as shown in FIG. 41B. Tumor cells that were transfected with a similarly constructed vector encoding a non-binding scFv, a human anti-CD28 scFv construct, grew as well as tumor cells that had not been transfected. The presence of a foreign protein, that is, human IgG1 constant domains or rat variable regions, did not make transfected K1735-WT cells immunogenic; the growth of the K1735-1D8 cells in C3H mice was identical to that of K1735-WT cells (untransfected).

[0337] To investigate the roles of CD4⁺ and CD8⁺ T lymphocytes and NK cells in the regression of K1735-1D8 tumors, naïve mice were injected intraperitoneally (i.p.) with monoclonal antibodies (mAbs, typically 50 μg in a volume 0.1 ml) to remove CD8⁺, CD4⁺ or both CD4⁺ and CD8⁺ T cells, or were injected with anti-asialo-GM1 rabbit antibodies to remove NK cells. Twelve days later, when flow cytometry analysis of spleen cells from identically treated mice showed that the targeted T cell populations were depleted, K1735-1D8 cells were transplanted s.c to each T cell-depleted group. K1735-1D8 had similar growth kinetics in mice that had been injected with the anti-CD8 MAb or control rat IgG while removal of CD4⁺ T cells resulted in the growth of K1735-1D8 with the same kinetics as K1735-WT. This failure to inhibit tumor growth after CD4+ T cell removal was observed regardless of the presence or absence of CD8+ T cells. K1735-1D8 grew in all NK-depleted mice, although more slowly than in the CD4-depleted group. The results are presented in FIG. 41C.

### Example 26

[0338] Therapeutic Effect of Tumor Cells Expressing Anti-4-1BB scFv IgG-CD80 Fusion Protein

[0339] This Example examines the ability of K1735-1D8 transfected tumor cells expressing an anti-CD137 scFv on the cell surface to generate a sufficient immune response in mice to mediate rejection of established, untransfected wild type tumors. C3H mice were transplanted with K1735-WT tumors (2×10⁶ cells/animal) and grown for approximately six days. Experiments were performed using mice with established K1735-WT tumors of 30 mm² surface area. Mice were vaccinated by s.c. injection of K1735-1D8 or irradiated K1735-WT cells on the contralateral side. Identical injections were repeated at the time points indicated in FIG. 42. One group of animals was given four weekly injections of K1735-1D8 cells. According to the same schedule, another group was given irradiated (12,000 rads) K1735-WT cells, and a third group was injected with PBS. The data are plotted in FIG. 42. The WT tumors grew progressively in all control mice and in all mice that received irradiated K1735-WT cells. In contrast, the tumors regressed in 4 of the 5 mice treated by immunization with K1735-1D8. The animals remained tumor-free and without signs of toxicity when the experiment was terminated 3 months later. In the fifth mouse, the tumor nodule decreased in size as long as the mouse received K1735-1D8 cells, but the tumor grew back after therapy was terminated.

[0340] In another experiment with 5 mice/group, mice were injected intravenously (i.v.) with 3×10⁵ K1735-WT cells to initiate lung metastases. Three days later, K1735-1D8 cells were transplanted s.c. This procedure was repeated once weekly for a month; control mice were injected with PBS. The experiment was terminated when one mouse in the control group died, 37 days after receiving the K1735-WT cells. At that time, lungs of the control mice each had >500 metastatic foci. In contrast, less than 10 metastatic foci were present in the lungs of the immunized mice.

[0341] In a third experiment, mixtures of K1735-WT cells and K1735-1D8 cells were injected into immunocompetent syngeneic C3H mice. Mice were injected subcutaneously with K7135-WT cells alone or with a mixture of 2×10⁶ K1735-WT cells and 2×10⁵ K1735-1D8 cells. Tumor growth was monitored at 5-day intervals.

### Example 27

[0342] Expression of Anti-4-1BB scFv IgG-CD80 Fusion Protein on the Cell Surface of Sarcoma Cells

[0343] This Example demonstrates expression of an anti-CD137 scFv on the cell surface of a second type of tumor cell by transfecting a murine sarcoma cell line with an anti-CD137 scFv IgG-CD80 construct.

[0344] The 1D8 scFv IgG WTH WTCH2CH3-CD80 polynucleotide (SEQ ID NO:______) was transferred from the pLNCX vector into pcDNA3-hygro vector using restriction enzyme digestion and ligation steps according to standard molecular biology methods. The constuct was cut with HindIII+Clal and thesFv fragment was filled in with Klenow (Roche) and the blunt-ended fragment was ligated into EcoR5 site of pcDNA3. Ag104 murine sarcoma tumor cells were transfected with the pcDNA3-hygro vector containing the 1D8 scFv IgG CD80 fusion protein. Hygromycin-resistant clones were screened by flow cytometry using a FITC anti-human IgG antibody to detect expression of the transgene. Only approximately 15% of the resistant clones had detectable fusion protein initially. Positive cells identified by flow cytometry were repeatedly panned on flasks coated with immobilized anti-human IgG (10 μg/ml) according to standard methods. Panning was performed by incubating cells on the coated plates for 30 min at 37 C; the plates were then washed 2-3× in versene or PBS. After each round, cells were tested for IgG expression by FACS. The histogram in FIG. 44 shows the staining pattern after four rounds of panning against anti-human IgG (black). Untransfected cells were stained and are indicated in gray. All of the cells in the population were positive.

### Example 28

[0345] Construction and Characterization of a Bispecific scFv Ig Fusion Protein and scFv Ig Fusion Proteins with a Mutation in the IgG1 CH2 Domain

[0346] An anti-CD20 (2H7) scFv IgG fusion protein was constructed that had a mutant hinge (MT (SSS)) and a mutant CH2 domain in which the proline at residue (position number 238 according to Ward et al., supra) was substituted with a serine. The 2H7 scFv IgG MTH (SSS) MTCH2WTCH3 encoding polynucleotide (SEQ ID NO:______) was constructed essentially according to methods described in Examples 1, 5, and 13. The IgG mutant hinge-mutant CH2-wild type CH3 domains were also fused to an anti-CD20 (2H7)-anti-CD40 (40.2.220) bispecific scFv. The anti-CD20-anti-CD40 scFv IgG MTH (SSS) MTCH2WTCH3 encoding polynucleotide sequence is shown in SEQ ID NO:______ and the encoded polypeptide is shown in SEQ ID NO:______.

[0347] COS cells were transiently transfected with vectors comprising the polynucleotide sequences encoding 2H7 scFv IgG MTH (SSS) MTCH2WTCH3 (SEQ ID NO:______); anti-CD20-anti-CD40 scFv IgG MTH (SSS) MTCH2WTCH3 (SEQ ID NO:______); 2H7 scFv IgG MTH (SSS) WTCH2CH3 (SEQ ID NO:______); and 2H7 scFv IgAH IgG WTCH2CH3 (SEQ ID NO:______) as described in Example 10. Culture supernatants were collected and the fusion proteins were purified by protein A chromatography (see Example 10). The purified polypeptides were fractionated by SDS-PAGE according to the method described in Example 10. Rituximab (anti-CD20 monoclonal antibody), and Bio-Rad prestained molecular weight standards (Bio-Rad, Hercules, Calif.), and Multimark® molecular weight standards (Invitrogen Life Technologies were also applied to the gel. The results are presented in FIG. 45.

[0348] The 2H7 scFv Ig fusion protein that contains a mutation in the CH2 domain was compared to fusion proteins that have the wild type CH2 domain in an ADCC assay. The assays were performed essentially as described in Examples 11 and 19. Fresh resting PBMC (effector cells) were added to ⁵¹Cr-labeled BJAB cells (target cells) at the ratios indicated in FIG. 46. Purified 2H7 scFv IgG MTH (SSS) MTCH2WTCH3, 2H7 scFv IgG MTH (SSS) WTCH2CH3, 2H7 scFv IgAH IgG WTCH2CH3, and Rituximab, each at 10 μg/ml were added to the effector/target cell mixtures and incubated for five hours at 37° C. Supernatants were harvested and the amount of chromium released was determined as described in Examples 11 and 19. Percent specific killing by each fusion protein is presented in FIG. 46.

### Example 29

[0349] Tumor Cell Surface Expression of an Anti-human CD3 scFv IgG Fusion Protein

[0350] An anti-human CD3 scFv Ig CD80 fusion protein was prepared essentially as described in Examples 1 and 12. The fusion protein comprised an anti-human CD3 scFv fused to wild type IgG1 hinge (SEQ ID NO:______) and wild type CH2 (SEQ ID NO:______) and CH3 (SEQ ID NO:______) domains, fused to CD80 transmembrane and cytoplasmic domains (SEQ ID NO:______) to enable cell surface expression of the anti-CD3 scFv. The anti-human CD3 scFv IgG WTH WTCH2CH3-CD80 polynucleotide (SEQ ID NO:______) encoding the polypeptide (SEQ ID NO:______) was transfected in Reh cells and into T51 cells (lymphoblastoid cell line). Expression of the anti-human CD3 scFv IgG fusion protein was detected by flow cytometry using FITC conjugated goat anti-human IgG (see methods in Examples 4, 10, 16, 18). FIG. 47A illustrates expression of the anti-human CD3 fusion protein on the cell surface of Reh cells, and FIG. 47B shows expression of the fusion protein on T41 cells.

[0351] ADCC assays were performed with the transfected Reh and T51 cells to determine if expression of the scFv-Ig polypeptides on the cell surface augmented effector cell function. Untransfected and transfected Reh cells and untransfected and transfected T51 cells were pre-labeled with ⁵¹Cr (100 μCi) (Amersham) for two hours at 37° C. Human PBMC served as effector cells and were added to the target cells (5×10⁴ cells per well of 96 well plate) at ratios of 20:1, 10:1, 5:1, and 2.5:1. After four hours at 37° C., culture supernatants were harvested and analyzed as described in Examples 11 and 12. Percent specific killing was calculated as described in Example 12. The results are presented in FIG. 48.

### Example 30

[0352] Induction of Cytokine Expression in Tumor Cells Expressing Anti-CD28 scFv on the Cell Surface

[0353] This Example describes the effect of cell surface expressed scFv on cytokine mRNA induction in stimulated lymphocytes co-cultured with tumor cells transfected with an anti-human CD28 scFv IgG-CD80 fusion protein.

[0354] Real time PCR analysis was performed on RNA samples from human PBMC stimulated with Reh, Reh-anti-CD28 (2e12) (see Example 12 for construction of 2e12 scFv IgG WTH WHTCH3CH2-CD80 and transfection of Reh cells), and Reh-CD80 (see Example 14) in order to measure the effects of the surface expressed scFv on cytokine production by the PBMC effector cells. For the real-time PCR assay, SYBR Green (QIAGEN) (Morrison et al., Biotechniques 24:954-8, 960, 962 (1998)) was used and measured by an ABI PRISM® 7000 Sequence Detection System (Applied Biosystems, Foster City, Calif.) that measures the formation of PCR product after each amplification cycle. Cells were harvested from cultures and total RNA prepared using QIAGEN RNA kits, including a QIA shredder column purification system to homogenize cell lysates, and RNeasy® mini-columns for purification of RNA. cDNA was reverse transcribed using equal amounts of RNA from each cell type and Superscript II Reverse Transcriptase (Life Technologies). SYBR Green real-time PCR analysis was then performed using the prepared cDNA as template and primer pairs specific for cytokine gene products. The average length of the PCR products that were amplified ranged from 150-250 base pairs. The cDNA levels for many activation response molecules including IFNγ, TNFα, GM-CSF, IL-4, IL-5, IL-6, IL-8, IL-10, IL-12, IL-15, ICOSL, CD80 and CD86 were assayed. Control reference cDNAs for constitutively expressed genes, including GAPDH, β-actin, and CD3ε were measured in each assay. The most significant induction of specific mRNA was observed for IFN-γ, and more modest induction was observed for CTLA-4 and ICOS.

### Example 31

[0355] Cloning of an Anti-Human 4-1BB Antibody and Construction of an Anti-Human 4-1BB scFv Ig Fusion Protein

[0356] A hybridoma cell line expressing a mouse anti-human monoclonal antibody (designated 5B9) was obtained from Dr. Robert Mittler, Emory University Vaccine Center, Atlanta, Ga. The variable heavy and light chain regions were cloned according to known methods for cloning of immunoglobulin genes and as described herein. Cells were grown in IMDM/15% FBS (Invitrogen Life Technologies) media for several days. Cells in logarithmic growth were harvested from cultures and total RNA prepared using QIAGEN RNA kits, including a QIA shredder column purification system to homogenize cell lysates, and RNeasy® mini-columns for purification of RNA according to manufacturer's instructions. cDNA was reverse transcribed using random hexamer primers and Superscript II Reverse Transcriptase (Invitrogen Life Technologies).

[0357] cDNA was anchor-tailed using terminal transferase and dGTP. PCR was then performed using an anchor-tail complementary primer and a primer that annealed specifically to the antisense strand of the constant region of either mouse Ck (for amplification of VL) or the appropriate isotype mouse CH1 (for amplification of VH). The amplified variable region fragments were TOPO® cloned (Invitrogen Life Technologies), and clones with inserts of the correct size were then sequenced. Consensus sequence for each variable domain was determined from sequence of at least four independent clones. The 5B9 VL and VH polynucleotide sequences are shown in SEQ ID NOs:______ and ______, respectively, and the deduced amino acid sequences are shown in SEQ ID NOs:______ and ______. The scFv was constructed by a sewing PCR method using overlapping primers containing a synthetic (gly₄ser)₃ linker domain inserted between the light and heavy chain variable regions (see Example 1). The 5B9 scFv polypeptide (SEQ ID NO:______) is encoded by the polynucleotide sequence comprising SEQ ID NO:______.

[0358] 5B9 scFv polynucleotide sequence was fused in frame to the polynucleotide sequence encoding the human IgG1 mutant hinge and wild type CH2 and CH3 (MTH (SSS) WTCH2CH3, SEQ ID NO:______) according to methods described in Examples 5, 10, and 13. COS cells were transiently transfected with a vector comprising the 5B9 scFv IgG MTH (SSS) WTCH2CH3 polynucleotide sequence (SEQ ID NO:______). Supernatant was collected and binding of the 5B9 scFv IgG MTH (SSS) WTCH2CH3 polypeptide (SEQ ID NO:______) was measured by flow immunocytofluorimetry essentially as described in Examples 4, 10, 16, and 18. Culture supernatant from the 5B9 hybridoma cell line was also included in the binding assay. Fresh human PBMC were incubated in the presence of immobilized anti-CD3 for four days prior to the binding experiment to induce expression of CD137 on the surface of activated T cells. Stimulated PBMC were washed and incubated with COS or hybridoma culture supernatant containing the 5B9 scFv IgG fusion protein or 5B9 murine monoclonal antibody, respectively, for 1 hour on ice. Binding of 5B9 scFv IgG fusion protein or 5B9 murine monoclonal antibody was detected with FITC conjugated anti-human IgG or anti-mouse IgG, respectively. The results are presented in FIG. 49.

### Example 32

[0359] Construction of 2H7 scFv IgG Fusion Proteins with Hinge Mutations

[0360] A 2H7 scFv IgG fusion proteins are constructed with the first cysteine residue and the second cystein in the IgG1 hinge region substituted with a serine residue to provide MTH (SCC) and MTH (CSC). The template for introduction of the mutations is a polynucleotide encoding 2H7 scFv WTH WTCH2CH3 (SEQ ID NO:______). The oligonucleotide introducing the mutations are 5′ PCR primer oligonucleotides HIgGMHcys1 (SEQ ID NO:______) and HIgGMHcys2 (SEQ ID NO:______). The constructs are prepared as described in SEQ ID NO:______). The encoding polynucleotides of the mutants are presented in SEQ ID NOs:______) and the polypeptide sequences are provided in SEQ ID NO:______).

[0361] Additional representative sequences of the present invention are as follows:

HuIgGi wild type hinge, CH2, CH3
tctgatcaggagcccaaatcttgtgacaaaactcacacatgcccaccgtgcccagcacctgaactcctggggggaccgtcagtctt
cctcttccccccaaaacccaaggacaccctcatgatctcccggacccctgaggtcacatgcgtggtggtggacgtgagccacgaa
gaccctgaggtcaagttcaactggtacgtggacggcgtggaggtgcataatgccaagacaaagccgcgggaggagcagtacaa
cagcacgtaccgtgtggtcagcgtcctcaccgtcctgcaccaggactggctgaatggcaaggagtacaagtgcaaggtctccaac
aaagccctcccagcccccatcgagaaaacaatctccaaagccaaagggcagccccgagaaccacaggtgtaCaCcctgccccc
atcccgggatgagctgaccaagaaccaggtcagcctgacctgcctggtcaaaggcttctatcccagcgacatCgcCgtggagtgg
gagagcaatgggcagccggagaacaactacaagaccacgcctcccgtgctggactccgacggctccttcttcctctacagcaag
ctcaccgtggacaagagcaggtggcagcaggggaacgtcttctcatgctccgtgatgcatgaggctctgcacaaccactacacgc
agaagagcctctccctgtctccgggtaaatgatctaga
HuIgGI wild type hinge, CH2, CH3
sdqepkscdkthtcppcpapellggpsvflfppkpkdtlmisrtpevtcvvvdvshedpevkthwyvd
gvevhnaktkpreeqynstyrvvsvltvlhqdwlngkeykckvsnkalpapiektiskakgqprepqvytlppsrdeltknqv
sltclvkgfypsdiavewesngqpennykttppvldsdgsfflyskltvdksrwqqgnvfscsvmhealhnhytqkslslspg
k
Llama IgG1 hinge, CH2, CH3
tgatcaagaaccacatggaggatgcacgtgcccncagtgcccncaatgcccngcnccngaactnccagg
aggcccttctgtctttgtcttccccccgaaacccaaggacgtcctctccatttttggaggccgagtcacgtgcgttgtagtggacgtcg
gaaagaaagaccccgaggtcaatttcaactggtatattgatggcgttgaggtgcgaacggccaatacgaagccaaaagaggaac
agttcaacagcacgtaccgcgtggtcagcgtcctgcccatccagcaccaggactggctgacggggaaggaattcaagtgcaagg
tcaacaacaaagctctcccggcccccatcgagaggaccatctccaaggccaaagggcagacccgggagccgcaggtgtacacc
ctggccccacaccgggaagaactggccaaggacaccgtgagcgtaacatgcctggtcaaaggcttctacccagctgacatcaac
gttgagtggcagaggaacggtcagccggagtcagagggcacctacgccaacacgccgccacagctggacaacgacgggacct
acttcctctacagcaagctctcggtgggaaagaacacgtggcagcggggagaaaccttaacctgtgtggtgatgcatgaggccct
gcacaaccactacacccagaaatccatcacccagtcttcgggtaaatagtaatctaga
Llama IgG1 hinge, CH2, CH3 (In FIG. 23 as Llama IgG1)
ephggctcpqcpapelpggpsvfvtbpkpkdvlsisgrpevtcvvvdvgkedpevnfhwyidgvevr
tantkpkeeqfnstyrvvsvlpiqhqdwltgketkckvnnkalpapiertiskakgqtrepqvytlaphreelakdtvsvtclvk
gfypadinvewqmgqpesegtyantppqldndgtyflysrlsvgkntwqrgctltgvvmhealhnhytqksitqssgk
Llama IgG2:
tgatcaagaacccaagacaccaaaaccacaaccacaaccacaaccacaacccaatcctacaacagaatccaagtgtcccaaatgt
ccagcccctgagctcctgggagggccctcagtcttcatcttccccccgaaacccaaggacgtcctctccatttctgggaggcccga
ggtcacgtgcgttgtggtagacgtgggccaggaagaccccgaggtcagtttcaactggtacattgatggcgctgaggtgcgaacg
gccaacacgaggccaaaagaggaacagttcaacagcacgtaccgcgtggtcagcgtcctgcccatccagcaccaggactggct
gacggggaaggaattcaagtgcaaggtcaacaacaaagctctcccggcccccatcgagaagaccatctccaaggccaaagggc
agacccgggagccgcaggtgtacaccctggccccacaccgggaagagctggccaaggacaccgtgagcgtaacatgcctggt
caaaggcttctacccacctgatatcaacgttgagtggcagaggaatgggcagccggagtcagagggcacytacgccaccacgcc
accccagctggacaacgacgggacctacttcctctacagcaagctctcggtgggaaagaacacgtggcagcagggagaaacctt
cacctgtgtggtgatgcacgaggccctgcacaaccactacacccagaaatccatcacccagtcttcgggtaaatagtaatctaga
Llama IgG2
Dqepktpkpqpqpqpqpnptteskcpkcpapellggpsvfifppkpkdvlsisgrpevtcvvvdvgq
edpevsfhwyidgaevrtantrpkeeqfnstyrvvsvlpiqhqdwltgkefkckvnnkalpapiektiskakgqtrepqvytla
phreelakdtvsvtclvkgfyppdinvewqmgqpesegtyattppqldndgtyflysklsvgkntwqqgctftcvvmhealh
nhytqksitqssgk
Llama IgG3 Fe
tgatcaagcgcaccacagcgaagaccccagctccaagtgtcccaaatgcccaggccctgaactccttgga
gggcccacggtcttcatcttccccccgaaagccaaggacgtcctctccatcacccgaaaacctgaggtcacgtgcttgtggtggac
gtgggtaaagaagaccctgagatcgagttcaagctggtccgtggatgacacagaggtacacacggctgagacaaagccaaagg
aggaacagttcaacagcacgtaccgcgtggtcagcgtcctgcccatccagcaccaggactggctgacggggaaggaattcaagt
gcaaggtcaacaacaaagctctcccagcccccatcgagaggaccatctccaaggccaaagggcagacccgggagccgcaggt
gtacaccctggccccacaccgggaagagctggccaaggacaccgtgagcgtaacctgcctggtcaaaggcttcttcccagctga
catcaacgttgagtggcagaggaatgggcagccggagtcagagggcacctacgccaacacgccgccacagctggacaacgac
gggacctacttcctctacagcaaactctccgtgggaaagaacacgtggcagcagggagaagtcttcacctgtgtggtgatgcacg
aggctctacacaatcactccacccagaaatccatcacccagtcttcgggtaaatagtaatctagagggccc
Llama IgG3 Fc
dqahhsedpsskepkcpgpellggptvfifppkakdvlsitrkpevtclwwtwvkktlrsssswsvddt
evhtaetkpkeeqfhstyrvvsvlpiqhqdwltgkefkekvnnkalpapiertiskakgqtrepqvytlaphreelakdtvsvte
lvkgffpadinvewqrngqpesegtyantppqldndgtyflysklsvgkntwqqgevftcvvmhealhnhstqksitqssgk
HuIgG1 wild type hinge
gatcaggagcccaaatcttgtgacaaaactcacacatgcccaccgtgcccagca
HuIgG1 wild type hinge
dqepkscdkthtcppepa
HuIgG1 H2, wild type hinge with leu at second position (results from BglI site)
gatctggagcccaaatcttgtgacaaaactcacccatgcccaccgtgcccagca
HuIgG1 H2, wild type hinge with leu at second position.
dlepksedkthtcppcpa
NT
HuIgG1 wild type CH2
cctgaactcctggggggaccgtcagtcttcctcttccccccaaaacccaaggacaccctcatgatctcccgg
acccctgaggtcacatgcgtggtggtggacgtgagccacgaagaccctgaggtcaagttcaactggtacgtggacggcgtggag
gtgcataatgccaagacaaagccgcgggaggagcagtacaacagcacgtaccgtgtggtcagcgtcctcaccgtcctgcaccag
gactggctgaatggcaaggagtacaagtgcaaggtctccaacaaagccctcccagcccccatcgagaaaaccatctccaaagcc
aaa
HuIgG1 wild typc CH2 AA
pellggpsvflfppkpkdtlmisrtpevtcvvvdvshedpevkthwyvdgvevhnaktkpreeqynst
yrvvsvltvlhqdwlngkeykckvsnkalpapiektiskak
NT HuIgG1 wild type CH3
gggcagccccgagaaccacaggtgtacaccctgcccccatcccgggaggagatgaccaagaaccaggt
cagcctgacctgcctggtcaaaggcttctatcccagcgacatcgccgtggagtgggagagcaatgggcagccggagaacaacta
caagaccacgcctcccgtgctggactccgaeggctccttettcctctatagcaagctcaccgtggacaagagcaggtggcagcag
gggaacgtcttctcatgctccgtgatgcatgaggctctgcacaaccactacacgcagaagagcctctccctgtccccgggtaaatg
a
AA HuIgG1 wild type CH3
gqprepqvytlppsreemtknqvsltclvkgfypsdiavewesngqpennykttppvldsdgsfflysk
ltvdksrwqqgnvfscsvmhealhnhytqkslslspgk
NT HuIgG1 mutated hinge (C—C—C—→S—S—S)
gatcaggagcccaaatcttctgacaaaactcacacatCcccaccgtccccagca
AA HuIgG1 mutated hinge (C—C—C—→S—S—S)
dqepkssdkthtsppspa
Mutant hinge, but wild type CH2 and CH3—reads from the hinge+Ig tail, HIgG1MTH WTCH2CH3:
tgatcaccccaaatcttctgacaaaactcacacatctccaccgtcctcagcacctgaactcctgggtggaccg
tcagtcttcctcttccccccaaaacccaaggacaccctcatgatctcccggacccctgaggtcacatgcgtggtggtggacgtgag
ccacgaagaccctgaggtcaagttcaactggtacgtggacggegtggaggtgcataatgccaagacaaagccgcgggaggagc
agtacaacagcacgtaccgtgtggtcagcgtcctcaccgtcctgcaccaggactggctgaatggcaaggagtacaagtgcaaggt
ctccaacaaagccctcccagcccccatcgagaaaacaatctccaaagccaaagggcagccccgagaaccacaggtgtacaccc
tgcccccatcccgggatgagctgaccaagaaccaggtcagcctgacctgcctggtcaaaggcttctatcccagcgacatcgccgt
ggagtgggagagcaatgggcagccggagaacaactacaagaccacgcctcccgtgctggactccgacggctcctcttcctcta
cagcaagctcaccgtggacaagagcaggtggcagcaggggaacgtcttctcatgctccgtgatgcatgaggctctgcacaacca
ctacacgcagaagagcctctccctgtctccgggtaaatgataatctaga
Protein sequence: Mutant hinge, but wild type CH2 and CH3
dhpkssdkthtsppssapellggpsvflfppkpkdtlmisrtpevtcvvvdvshedpevkthwyvdgv
evhnaktkpreeqynstyrvvsvltvlhqdwlngkeykekvsnkalpapiektiskakgqprepqvytlppsrdeltknqvslt
clvkgfypsdiavewesngqpennykttppvldsdgsfflyskltvdksrwqqgflvfsesvmhealhflhytqkslslspgk
LLGl-5′bgl 35 mer Llama IgG1 5′
5′-gtt gtt gat caa gaa cca cat gga gga tgc acg tg-3′
LLG2-5′bgl 32 mer, Llama IgG2-5′
5′-gtt gtt gat caa gaa ccc aag aca cca aaa cc-3′
LLG3-5′bgl 33 mer, Llama IgG3-5′
5′-gtt gtt gat caa gcg cac cac agc gaa gac ccc-3′
LLseqsense 19 mer, llama sequencing primer
5′-ctg aga tcg agt tca gct g-3′
LLseqAS 19 mer
5′-cct cct ttg gct ttg tct c-3′
NT
2H7 scFv llama IgG1
aagcttgccgccatggattttcaagtgcagattttcagcttcctgctaatcagtgcttcagtcataattgccagag
gacaaattgttctctcccagtctccagcaatcctgtctgcatctccaggggagaaggtcacaatgacttgcagggccagctcaagtg
taagttacatgcactggtaccagcagaagccaggatcctcccccaaaccctggatttatgccccatccaacctggcttctggagtcc
ctgctcgcttcagtggcagtgggtctgggacctcttactctctcacaatcagcagagtggaggctgaagatgctgccacttattactg
ccagcagtggagttttaacccacccacgttcggtgctgggaccaagctggagctgaaagatggcggtggctcgggcggtggtgg
atctggaggaggtgggagctctcaggcttatctacagcagtctggggctgagctggtgaggcctggggcctcagtgaagatgtcct
gcaaggcttctggctacacatttaccagttacaatatgcactgggtaaagcagacacctagacagggcctggaatggattggagct
atttatccaggaaatggtgatacttcctacaatcagaagttcaagggcaaggccacactgactgtagacaaatcctccagcacagcc
tacatgcagctcagcagcctgacatctgaagactctgcggtctatttctgtgcaagagtggtgtactatagtaactcttactggtacttc
gatgtctggggcacagggaccacggtcaccgtctcttctgatcaagaaccacatggaggatgcacgtgcctccagtgcccncaat
gcccngcnccngaactcccaggaggcccttctgtctttgtcttccccccgaaacccaaggacgtcctctccatttttggaggccga
gtcacgtgcgttgtagtggacgtcggaaagaaagaccccgaggtcaatttcaactggtatattgatggcgttgaggtgcgaacggc
caatacgaagccaaaagaggaacagttcaacagcacgtaccgcgtggtcagcgtcctgcccatccagcaccaggactggctgac
ggggaaggaattcaagtgcaaggtcaacaacaaagctctcccggcccccatcgagaggaccatctccaaggccaaagggcaga
cccgggagccgcaggtgtacaccctggccccacaccgggaagaactggccaaggacaccgtgagcgtaacatgcctggtcaa
aggcttctacccagctgacatcaacgttgagtggcagaggaacggtcagccggagtcagagggcacctacgccaacacgccgc
cacagctggacaacgacgggacctacttcctctacagcaagctctcggtgggaaagaacacgtggcagcggggagaaaccttaa
cctgtgtggtgatgcatgaggccctgcacaaccactacacccagaaatccatcacccagtcttcgggtaaatagtaatctaga
AA 2117 scFv llama IgGI
mdfqvqifsfllisasvllargqivlsqspailsaspgekvtmtcrasssvsymhwyqqkpgsspkpwiy
apsnlasgvparfsgsgsgtsysltisrveaedaatyycqqwsfhpptfgagtklelkdgggsggggsggggssqaylqqsgae
lvrpgasvkmsckasgytftsynmhwvkqtprqglewigaiypgngdtsynqkfkgkatltvdkssstaymqlssltsedsa
vyfcarvvyysnsywyfdvwgtgttvtvssdqephggctcpqcpapelpggpsvlvfppkpkdvlsifgglwtcvvvdvgk
kdpevnfnwyidgvevrtantkpkeeqthstyrvvsvlpiqhqdwltgketkckvnflkalpapiertiskakgqtrepqvytl
aphreelakdtvsvtclvkgfypadinvewqrflgqpesegtyafltppqldfldgtyflysklasvgkfltwqrgctltcvvmheal
hnhytqksitqssgk
NT 2117 scFv llama IgG2
aagcttgccgccatggattttcaagtgcagattttcagcttcctgctaatcagtgcttcagtcataattgccagag
gacaaattgttctctcccagtctccagcaatcctgtctgcatctccaggggagaaggtcacaatgacttgcagggccagctcaagtg
taagttacatgcactggtaccagcagaagccaggatcctcccccaaaccctggatttatgccccatccaacctggcttctggagtcc
ctgctcgcttcagtggcagtgggtctgggacctcttactctctcacaatcagcagagtggaggctgaagatgctgccacttattactg
ccagcagtggagttttaacccacccacgttcggtgctgggaccaagctggagctgaaagatggcggtggctcgggcggtggtgg
atctggaggaggtgggagctctcaggcttatctacagcagtctggggctgagctggtgaggcctggggcctcagtgaagatgtcct
gcaaggcttctggctacacatttaccagttacaatatgcactgggtaaagcagacacctagacagggcctggaatggattggagct
atttatccaggaaatggtgatacttcctacaatcagaagttcaagggcaaggccacactgactgtagacaaatcctccagcacagcc
tacatgcagctcagcagcctgacatctgaagactctgcggtctatttctgtgcaagagtggtgtactatagtaactcttactggtacttc
gatgtctggggcacagggaccacggtcaccgtctcttctgatcaagaacccaagacaccaaaaccacaaccacaaccacaacca
caacccaatcctacaacagaatccaagtgtcccaaatgtccagcccctgagctcctgggagggccctcagtcttcatcttccccccg
aaacccaaggacgtcctctccatttcctgggaggcccgaggtcacgtgcgttgtggtagacgtgggccaggaagaccccgaggtc
agtttcaactggtacattgatggcgctgaggtgcgaacggccaacacgaggccaaaagaggaacagttcaacagcacgtaccgc
gtggtcagcgtcctgcccatccagcaccaggactggctgacggggaaggaattcaagtgcaaggtcaacaacaaagctctcccg
gcccccatcgagaagaccatctccaaggccaaagggcagacccgggagccgcaggtgtacaccctggccccacaccgggaa
gagctggccaaggacaccgtgagcgtaacatgcctggtcaaaggcttctacccacctgatatcaacgttgagtggcagaggaatg
ggcagccggagtcagagggcacytacgccaccacgccaccccagctggacaacgacgggacctacttcctctacagcaagctc
tcggtgggaaagaacacgtggcagcagggagaaaccttcacctgtgtggtgatgcacgaggccctgcacaaccactacacccag
aaatccatcacccagtcttcgggtaaatagtaatctaga
AA
2H7 scFv llama IgG2
mdfqvqifsfllisasviiargqivlsqspailsaspgekvtmtcrasssvsymhwyqqkpgsspkpwiy
apsnlasgvparfsgsgsgtsysltisrveaedaatyycqqwsfnpptfgagtklelkdgggsggggsggggssqaylqqsgae
lvrpgasvkmsckasgytftsynmhwvkqtprqglewigaiypgngdtsynqktkgkatltvdkssstaymqlssltsedsa
vyfcarvvyysnsywyfdvwgtgttvtvssdqepktpkpqpqpqpqpnptteskcpkcpapellggpsvfifppkpkdvlsi
sgrpevtcvvvdvgqedpevsfnwyidgaevrtantrpkeeqffistyrvvsvlpiqhqdwltgkefkckvnnkalpapiekti
skakgqtrepqvytlaphreelakdtvsvtclvkgfyppdinvewqmgqpesegtyattppqldndgtyflysklsvgkntw
qqgctftcvvmhealhnhytqksitqssgk
NT
2H7 scFv llama IgG3
aagcttgccgccatggattttcaagtgcagattttcagcttcctgctaatcagtgcttcagtcataattgccagag
gacaaattgttctctcccagtctccagcaatcctgtctgcatctccaggggagaaggtcacaatgacttgcagggccagctcaagtg
taagttacatgcactggtaccagcagaagccaggatcctcccccaaaccctggatttatgccccatccaacctggcttctggagtcc
ctgctcgcttcagtggcagtgggtctgggacctcttactctctcacaatcagcagagtggaggctgaagatgctgccacttattactg
ccagcagtggagttttaacccacccacgttcggtgctgggaccaagctggagctgaaagatggcggtggctcgggcggtggtgg
atctggaggaggtgggagctctcaggcttatctacagcagtctggggctgagctggtgaggcctggggcctcagtgaagatgtcct
gcaaggcttctggctacacatttaccagttacaatatgcactgggtaaagcagacacctagacagggcctggaatggattggagct
atttatccaggaaatggtgatacttcctacaatcagaagttcaagggcaaggccacactgactgtagacaaatcctccagcacagcc
tacatgcagctcagcagcctgacatctgaagactctgcggtctatttctgtgcaagagtggtgtactatagtaactcttactggtacttc
gatgtctggggcacagggaccacggtcaccgtctcttctgatcaagcgaaccacagcgaagaccccagctccaagtgtcccaaat
gcccaggccctgaactccttggagggcccacggtcttcatcttccccccgaaagccaaggacgtcctctccatcacccgaaaacct
gaggtcacgtgcttgtggtggacgtgggtaaagaagaccctgagatcgagttcaagctggtccgtggatgacacagaggtacaca
cggctgagacaaagccaaaggaggaacagttcaacagcacgtaccgcgtggtcagcgtcctgcccatccagcaccaggactgg
ctgacggggaaggaattcaagtgcaaggtcaacaacaaagctctcccagcccccatcgagaggaccatctccaaggccaaagg
gcagacccgggagccgcaggtgtacaccctggccccacaccgggaagagctggccaaggacaccgtgagcgtaacctgcctg
gtcaaaggcttcttcccagctgacatcaacgttgagtggcagaggaatgggcagccggagtcagagggcacctacgccaacacg
ccgccacagctggacaacgacgggacctacttcctctacagcaaactctccgtgggaaagaacacgtggcagcagggagaagt
cttcacctgtgtggtgatgcacgaggctctacacaatcactccacccagaaatccatcacccagtcttcgggtaaatagtaatctaga
gggccc
AA
2H7 scFv llama IgG3
mdfqvqifsfllisasviiargqivlsqspailsaspgekvtmtcrasssvsymhwyqqkpgsspkpwiy
apsnlasgvparfsgsgsgtsysltisrveaedaatyycqqwsfnpptfgagtklelkdgggsggggsggggssqaylqqsgae
lvrpgasvkmsckasgytftsynmhwvkqtprqglewigaiypgngdtsynqkfkgkatltvdkssstaymqlssltsedsa
vyfcarvvyysnsywyfdvwgtgttvtvssdqahshsedpsskcpkcpgpellggptvfifppkakdvlsitrkpevtclwwt
wvkktlrsssswsvddtevhtaetkpkeeqthstyrvvsvlpiqhqdwltgkefkckvnnkalpapiertiskakgqtrepqv
ytlaphreelakdtvsvtclvkgffpadinvewqrngqpesegtyantppqldndgtyflysklsvgkntwqqgevftcvvm
healhnhstqksitqssgk
2H7+Completely WT IgG tail:
2H7 scFv WTH WTCH2CH3
Nucleotide sequence:
aagcttgccgccatggattttcaagtgcagattttcagcttcctgctaatcagtgcttcagtcataattgccagag
gacaaattgttctctcccagtctccagcaatcctgtctgcatctccaggggagaaggtcacaatgacttgcagggccagctcaagtg
taagttacatgcactggtaccagcagaagccaggatcctcccccaaaccctggatttatgccccatccaacctggcttctggagtcc
ctgctcgcttcagtggcagtgggtctgggacctcttactctctcacaatcagcagagtggaggctgaagatgctgccacttattactg
ccagcagtggagttttaacccacccacgttcggtgctgggaccaagctggagctgaaagatggcggtggctcgggcggtggtgg
atctggaggaggtgggagctctcaggcttatctacagcagtctggggctgagctggtgaggcctggggcctcagtgaagatgtcct
gcaaggcttctggctacacatttaccagttacaatatgcactgggtaaagcagacacctagacagggcctggaatggattggagct
atttatccaggaaatggtgatacttcctacaatcagaagttcaagggcaaggccacactgactgtagacaaatcctccagcacagcc
tacatgcagctcagcagcctgacatctgaagactctgcggtctatttctgtgcaagagtggtgtactatagtaactcttactggtacttc
gatgtctggggcacagggaccacggtcaccgtctcttctgatcaggagcccaaatcttgtgacaaaactcacacatgcccaccgtg
cccagcacctgaactcctggggggaccgtcagtcttcctcttccccccaaaacccaaggacaccctcatgatctcccggacccctg
aggtcacatgcgtggtggtggacgtgagccacgaagaccctgaggtcaagttcaactggtacgtggacggcgtggaggtgcata
atgccaagacaaagccgcgggaggagcagtacaacagcacgtaccgtgtggtcagcgtcctcaccgtcctgcaccaggactgg
ctgaatggcaaggagtacaagtgcaaggtctccaacaaagccctcccagcccccatcgagaaaacaatctccaaagccaaaggg
cagccccgagaaccacaggtgtacaccctgcccccatcccgggatgagctgaccaagaaccaggtcagcctgacctgcctggtc
aaaggcttctatcccagcgacatcgccgtggagtgggagagcaatgggcagccggagaacaactacaagaccacgcctcccgt
gctggactccgacggctccttcttcctctacagcaagctcaccgtggacaagagcaggtggcagcaggggaacgtcttctcatgct
ccgtgatgcatgaggctctgcacaaccactacacgcagaagagcctctccctgtctccgggtaaatgatctaga
2H7+Completely WT IgG tail:
2H7 scFv WTH WTCH2CH3
Protein sequence
mdfqvqifsfllisasviiargqivlsqspailsaspgekvtmtcrasssvsymhwyqqkpgsspkpwiy
apsnlasgvparfsgsgsgtsysltisrveaedaatyycqqwsfripptfgagtklelkdgggsggggsggggssqaylqqsgae
lvrpgasvkmsckasgytftsynmhwvkqtprqglewigaiypgngdtsynqktkgkatltvdkssstaymqlssltsedsa
vyfcarvvyysnsywyfdvwgtgttvtvssdqepkscdkthtcppcpapellggpsvflfppkpkdtlmisrtpevtcvvvd
vshedpevkfnwyvdgvevhnaktkpreeqynstyrvvsvltvlhqdwlngkeykckvsnkalpapiektiskakgqpre
pqvytlppsrdeltknqvsltclvkgfypsdiavewesngqpennykttppvldsdgsfflyskltvdksrwqqgnvfscsvm
healhinhytqkslslspgk
NT
CD80 transmembrane domain and cytoplasmic tail (+restriction sites)
gcggatccttcgaacctgctcccatcctgggccattaccttaatctcagtaaatggaatttttgtgatatgctgcc
tgacctactgctttgccccaagatgcagagagagaaggaggaatgagagattgagaagggaaagtgtacgccctgtataaatcga
t
AA
CD80 transmembrane domain and cytoplasmic tall
adpsnllpswaitlisvngifviccltycfaprcrerrrnerlrresvrpv
NT
40.2.220 VL (anti-human CD40 scFv #1--VL)
aagcttatggattttcaagtgcagattttcagcttcctgctaatcagtgcttcagtcataatgtccagaggagtcg
acattgttctgactcagtctccagccaccctgtctgtgactccaggagatagagtctctctttcctgcagggccagccagagtattagc
gactacttacactggtatcaacaaaaatcacatgagtctccaaggcttctcatcaaatatgcttcccattccatctctgggatcccctcc
aggttcagtggcagtggatcagggtcagatttcactctcagtatcaacagtgtggaacctgaagatgttggaatttattactgtcaaca
tggtcacagctttccgtggacgttcggtggaggcaccaagctggaaatcaaacgg
AA
40.2.220 VL (anti-human CD40 scFv #1--VL)
mdfqvqifsfllisasvimsrgvdivltqspatlsvtpgdrvslscrasqsisdylhwyqqkshesprlliky
ashsisgipsrfsgsgsgsdftlsinsvepedvgiyycqhghsfpwtfgggtkleikr
NT
40.2.220 VH (for anti-human CD40 scFv #1--VH)
cagatccagttggtgcaatctggacctgagctgaagaagcctggagagacagtcaggatctcctgcaaggc
ttctgggtatgccttcacaactactggaatgcagtgggtgcaagagatgccaggaaagggtttgaagtggattggctggataaacac
cccactctggagtgccaaaatatgtagaagacttcaaggacggtttgccttctctttggaaacctctgccaacactgcatatttacaga
taagcaacctcaaagatgaggacacggctacgtatttctgtgtgagatccgggaatggtaactatgacctggcctactttgcttactg
gggccaagggacactggtcactgtctctgatca
AA
40.2.220 VH (for anti-human CD40 scFv #1--VH)
qiqlvqsgpelkkpgctvrisckasgyaftttgmqwvqempgkglkwigwintplwsakicrrlqgrfa
fsletsantaylqisnlkdedtatyfcvrsgngnydlayfaywgqgtlvtvs
NT
40.2.220 scFv (anti-human CD40 scFv #1)
aagcttatggattttcaagtgcagattttcagcttcctgctaatcagtgcttcagtcataatgtccagaggagtcg
acattgttctgactcagtctccagccaccctgtctgtgactccaggagatagagtctctctttcctgcagggccagccagagtattagc
gactacttacactggtatcaacaaaaatcacatgagtctccaaggcttctcatcaaatatgcttcccattccatctctgggatcccctcc
aggttcagtggcagtggatcagggtcagatttcactctcagtatcaacagtgtggaacctgaagatgttggaatttattactgtcaaca
tggtcacagctttccgtggacgttcggtggaggcaccaagctggaaatcaaacggggtggcggtggctcgggcggaggtgggtc
gggtggcggcggatctcagatccagttggtgcaatctggacctgagctgaagaagcctggagagacagtcaggatctcctgcaa
ggcttctgggtatgccttcacaactactggaatgcagtgggtgcaagagatgccaggaaagggtttgaagtggattggctggataa
acaccccactctggagtgccaaaatatgtagaagacttcaaggacggtttgccttctctttggaaacctctgccaacactgcatattta
cagataagcaacctcaaagatgaggacacggctacgtatttctgtgtgagatccgggaatggtaactatgacctggcctactttgctt
actggggccaagggacactggtcactgtctctgatca
AA
40.2.220 scFv (anti-human CD40 scFv HI
mdfqvqifsfllisasvimsrgvdivltqspatlsvtpgdrvslscrasqsisdylhwyqqkshesprlliky
ashsisgipsrfsgsgsgsdftlsinsvepedvgiyycqhghsfpfgggtkleikrggggsggggsggggsqiq1vqsgpel
kkpgctvrisckasgyaftttgmqwvqempgkglkwigwintplwsakicrrlqgrfafsletsantaylqisnlkdedtatyfc
vrsgngnydlayfaywgqgtlvtvs
NT
2e12 VL (with L6 VK leader peptide)
atggattttcaagtgcagattttcagcttcctgctaatcagtgcttcagtcataatgtccagaggagtcgacattg
tgctcacccaatctccagcttctttggctgtgtctctaggtcagagagccaccatctcctgcagagccagtgaaagtgttgaatattat
gtcacaagtttaatgcagtggtaccaacagaaaccaggacagccacccaaactcctcatctctgctgcatccaacgtagaatctgg
ggtccctgccaggtttagtggcagtgggtctgggacagacttcagcctcaacatccatcctgtggaggaggatgatattgcaatgta
tttctgtcagcaaagtaggaaggttccttggacgttcggtggaggcaccaagctggaaatcaaacgg
AA
2e12 VL (with L6 VK leader peptide)
mdfqvqifsfllisasvimsrgvdivltqspaslavslgqratiscrasesveyyvtslmqwyqqkpgqp
pkllisaasnvesgvparfsgsgsgtdfslnihpveeddiamyfcqqsrkvpwtfgggtkleikr
NT
2e12 VH (no leader peptide)
caggtgcagctgaaggagtcaggacctggcctggtggcgccctcacagagcctgtccatcacatgcaccg
tctcagggttctcattaaccggctatggtgtaaactgggttcgccagcctccaggaaagggtctggagtggctgggaatgatatggg
gtgatggaagcacagactataattcagctctcaaatccagactgagcatcaccaaggacaactccaagagccaagttttcttaaaaa
tgaacagtctgcaaactgatgacacagccagatactactgtgccagagatggttatagtaactttcattactatgttatggactactgg
ggtcaaggaacctcagtcaccgtctcctca(gatctg)
AA
2e12 VH
qvqlkesgpglvapsqslsitctvsgfsltgygvnwvrqppgkglewlgmiwgdgstdynsalksrlsit
kdnsksqvflkmnslqtddtaryycardgysnthyyvmdywgqgtsvtvss
NT
2e12scFv(+Restriction sites)
aagcttatggattttcaagtgcagattttcagcttcctgctaatcagtgcttcagtcataatgtccagaggagtcg
acattgtgctcacccaatctccagcttctttggctgtgtctctaggtcagagagccaccatctcctgcagagccagtgaaagtgttgaa
tattatgtcacaagtttaatgcagtggtaccaacagaaaccaggacagccacccaaactcctcatctctgctgcatccaacgtagaat
ctggggtccctgccaggtttagtggcagtgggtctgggacagacttcagcctcaacatccatcctgtggaggaggatgatattgcaa
tgtatttctgtcagcaaagtaggaaggttccttggacgttcggtggaggcaccaagctggaaatcaaacggggtggcggtggctcg
ggcggaggtgggtcgggtggcggcggatctcaggtgcagctgaaggagtcaggacctggcctggtggcgccctcacagagcc
tgtccatcacatgcaccgtctcagggttctcattaaccggctatggtgtaaactgggttcgccagcctccaggaaagggtctggagt
ggctgggaatgatatggggtgatggaagcacagactataattcagctctcaaatccagactgagcatcaccaaggacaactccaa
gagccaagttttcttaaaaatgaacagtctgcaaactgatgacacagccagatactactgtgccagagatggttatagtaactttcatt
actatgttatggactactggggtcaaggaacctcagtcaccgtctcctct(gatcag)
AA
2e12scFv (+Restriction sites)
mdfqvqifsfllisasvimsrgvdivltqspaslavslgqratiscrasesveyyvtslmqwyqqkpgqp
pkllisaasnvesgvparfsgsgsgtdfslnihpveeddiamyfcqqsrkvpwtfgggtkleikrggggsggggsggggsqvq
lkesgpglvapsqslsitctvsgfsltgygvnwvrqppgkglewlgmiwgdgstdyflsalksrlsitkdflsksqvflkmflslqt
ddtaryycardgysnfhyyvmdywgqgtsvtvss
10A8 is anti-CD 152 (CTLA-4)
10A8 VL (with L6 VK leader peptide)
atggattttcaagtgcagattttcagcttcctgctaatcagtgcttcagtcataatgtccagaggagtcgacatcc
agatgacacagtctccatcctcactgtctgcatctctgggaggcaaagtcaccatcacttgcaaggcaagccaagacattaagaagt
atataggttggtaccaacacaagcctggaaaaggtcccaggctgctcatatattacacatctacattacagccaggcatcccatcaa
ggttcagtggaagtgggtctgggagagattattccctcagcatcagaaacctggagcctgaagatattgcaacttattattgtcaaca
gtatgataatcttccattgacgttcggctcggggacaaagttggaaataaaacgg
AA
10A8 VL
mdfqvqifsfllisasvimsrgvdiqmtqspsslsaslggkvtitckasqdikkyigwyqhkpgkgprlli
yytstlqpgipsrfsgsgsgrdyslsirnlepediatyycqqydnlpltfgsgtkleikr
NT
10A8 VH (no leader peptide)
gatgtacagcttcaggagtcaggacctggcctcgtgaaaccttctcagtctctgtctctcacctgctctgtcact
ggctactccatcaccagtggtttctactggaactggatccgacagtttccgggaaacaaactggaatggatgggccacataagcca
cgacggtaggaataactacaacccatctctcataaatcgaatctccatcactcgtgacacatctaagaaccagtttttcctgaagttga
gttctgtgactactgaggacacagctacatatttctgtgcaagacactacggtagtagcggagctatggactactggggtcaaggaa
cctcagtcaccgtctcctctgatca
AA
10A8 VH
dvqlqesgpglvkpsqslsltcsvtgysitsgfywnwirqfpgnklewmghishdgrnnynpslinrisi
trdtsknqfflklssvttedtatyfcarhygssgamdywgqgtsvtvss
NT
10A8 scFv
aagcttatggattttcaagtgcagattttcagcttcctgctaatcagtgcttcagtcataatgtccagaggagtcg
acatccagatgacacagtctccatcctcactgtctgcatctctgggaggcaaagtcaccatcacttgcaaggcaagccaagacatta
agaagtatataggttggtaccaacacaagcctggaaaaggtcccaggctgctcatatattacacatctacattacagccaggcatcc
catcaaggttcagtggaagtgggtctgggagagattattccctcagcatcagaaacctggagcctgaagatattgcaacttattattgt
caacagtatgataatcttccattgacgttcggctcggggacaaagttggaaataaaacggggtggcggtggctcgggcggtggtg
ggtcgggtggcggcggatctgatgtacagcttcaggagtcaggacctggcctcgtgaaaccttctcagtctctgtctctcacctgctc
tgtcactggctactccatcaccagtggtttctactggaactggatccgacagtttccgggaaacaaactggaatggatgggccacat
aagccacgacggtaggaataactacaacccatctctcataaatcgaatctccatcactcgtgacacatctaagaaccagtttttcctga
agttgagttctgtgactactgaggacacagctacatatttctgtgcaagacactacggtagtagcggagctatggactactggggtca
aggaacctcagtcaccgtctcctctgatca
AA
10A8 scFv
mdfqvqifsfllisasvimsrgvdiqmtqspsslsaslggkvtitckasqdikkyigwyqhkpgkgprlli
yytsflqpgipsrfsgsgsgrdyslsimlepediatyycqqydnlpltfgsgtkleikrggggsggggsggggsdvqlqesgpgl
vkpsqslsltcsvtgysitsgfjwnwirqfpgnklewmghishdgrnnynpslinrisitrdtsknqfflklssvttedtatyfcar
hygssgamdywgqgtsvtvssd
NT
40.2.220-hmtlgG1-hCD80
aagcttatggattttcaagtgcagattttcagcttcctgctaatcagtgcttcagtcataatgtccagaggagtcg
acattgttctgactcagtctccagccaccctgtctgtgactccaggagatagagtctctctttcctgcagggccagccagagtattagc
gactacttacactggtatcaacaaaaatcacatgagtctccaaggcttctcatcaaatatgcttcccattccatctctgggatcccctcc
aggttcagtggcagtggatcagggtcagatttcactctcagtatcaacagtgtggaacctgaagatgttggaatttattactgtcaaca
tggtcacagctttccgtggacgttcggtggaggcaccaagctggaaatcaaacggggtggcggtggctcgggcggaggtgggtc
gggtggcggcggatctcagatccagttggtgcaatctggacctgagctgaagaagcctggagagacagtcaggatctcctgcaa
ggcttctgggtatgccttcacaactactggaatgcagtgggtgcaagagatgccaggaaagggtttgaagtggattggctggataa
acaccccactctggagtgccaaaatatgtagaagacttcaaggacggtttgccttctctttggaaacctctgccaacactgcatattta
cagataagcaacctcaaagatgaggacacggctacgtatttctgtgtgagatccgggaatggtaactatgacctggcctactttgctt
actggggccaagggacactggtcactgtctctgatctggagcccaaatcttctgacaaaactcacacatccccaccgtccccagca
cctgaactcctggggggatcgtcagtcttcctcttccccccaaaacccaaggacaccctcatgatctcccggacccctgaggtcac
atgcgtggtggtggacgtgagccacgaagaccctgaggtcaagttcaactggtacgtggacggcgtggaggtgcataatgccaa
gacaaagccgcgggaggagcagtacaacagcacgtaccgtgtggtcagcgtcctcaccgtcctgcaccaggactggctgaatg
gcaaggagtacaagtgcaaggtctccaacaaagccctcccagcccccatcgagaaaaccatctccaaagccaaagggcagccc
cgagaaccacaggtgtacaccctgcccccatcccgggatgagctgaccaagaaccaggtcagcctgacctgcctggtcaaaggc
ttctatcccagcgacatcgccgtggagtgggagagcaatgggcagccggagaacaactacaagaccacgcctcccgtgctggac
tccgacggctccttcttcctctacagcaagctcaccgtggacaagagcaggtggcagcaggggaacgtcttctcatgctccgtgat
gcatgaggctctgcacaaccactacacgcagaagagcctctccctgtctccgggtaaagcggatccttcgaacctgctcccatcct
gggccattaccttaatctcagtaaatggaatttttgtgatatgctgcctgacctactgctttgccccaagatgcagagagagaaggag
gaatgagagattgagaagggaaagtgtacgccctgtataaatcgat
AA
40.2.220-hmtIgG1-hCD80
mdfqvqifsfllisasvimsrgvdivltqspatlsvtpgdrvslscrasqsisdylhwyqqkshesprlliky
ashsisgipsrfsgsgsgsdftlsinsvepedvgiyycqhghsfpwtfgggtkleikrggggsggggsggggsqiqlvqsgpel
kkpgetvrisckasgyaftttgmqwvqempgkglkwigwintplwsakicrrlqgrfafsletsafltaylqisfllkdedtatyfc
vrsgngnydlayfaywgqgtlvtvsdlepkssdkthtsppspapellggssvflfppkpkdtlmisrtpevtcvvvdvshedpe
vkfhwyvdgvevhnaktkpreeqynstyrvvsvltvlhqdwlflgkeykckvsflkalpapiektiskakgqprepqvytlpp
srdeltknqvsltclvkgfypsdiavewesngqpennykttppvldsdgsfflyskltvdksrwqqgnvfscsvmhealhnhy
tqkslslspgkadpsnllpswaitlisvngifviccltycfaprcrerrrnerlrresvrpv
NT
2e12scFv- hmtlgG1-CD80 fusion protein
aagcttatggattttcaagtgcagattttcagcttcctgctaatcagtgcttcagtcataatgtccagaggagtcg
acattgtgctcacccaatctccagcttctttggctgtgtctctaggtcagagagccaccatctcctgcagagccagtgaaagtgttgaa
tattatgtcacaagtttaatgcagtggtaccaacagaaaccaggacagccacccaaactcctcatctctgctgcatccaacgtagaat
ctggggtccctgccaggtttagtggcagtgggtctgggacagacttcagcctcaacatccatcctgtggaggaggatgatattgcaa
tgtatttctgtcagcaaagtaggaaggttccttggacgttcggtggaggcaccaagctggaaatcaaacggggtggcggtggctcg
ggcggaggtgggtcgggtggcggcggatctcaggtgcagctgaaggagtcaggacctggcctggtggcgccctcacagagcc
tgtccatcacatgcaccgtctcagggttctcattaaccggctatggtgtaaactgggttcgccagcctccaggaaagggtctggagt
ggctgggaatgatatggggtgatggaagcacagactataattcagctctcaaatccagactgagcatcaccaaggacaactccaa
gagccaagttttcttaaaaatgaacagtctgcaaactgatgacacagccagatactactgtgccagagatggttatagtaactttcatt
actatgttatggactactggggtcaaggaacctcagtcaccgtctcctcagatctggagcccaaatcttctgacaaaactcacacatc
cccaccgtccccagcacctgaactcctggggggatcgtcagtcttcctcttccccccaaaacccaaggacaccctcatgatctccc
ggacccctgaggtcacatgcgtggtggtggacgtgagccacgaagaccctgaggtcaagttcaactggtacgtggacggcgtgg
aggtgcataatgccaagacaaagccgcgggaggagcagtacaacagcacgtaccgtgtggtcagcgtcctcaccgtcctgcacc
aggactggctgaatggcaaggagtacaagtgcaaggtctccaacaaagccctcccagcccccatcgagaaaaccatctccaaag
ccaaagggcagccccgagaaccacaggtgtacaccctgcccccatcccgggatgagctgaccaagaaccaggtcagcctgacc
tgcctggtcaaaggcttctatcccagcgacatcgccgtggagtgggagagcaatgggcagccggagaacaactacaagaccac
gcctcccgtgctggactccgacggctccttcttcctctacagcaagctcaccgtggacaagagcaggtggcagcaggggaacgtc
ttctcatgctccgtgatgcatgaggctctgcacaaccactacacgcagaagagcctctccctgtctccgggtaaagcggatccttcg
aacctgctcccatcctgggccattaccttaatctcagtaaatggaatttttgtgatatgctgcctgacctactgctttgccccaagatgca
gagagagaaggaggaatgagagattgagaagggaaagtgtacgccctgtataaatcgat
AA
2e12scFv- hmtIgG1-CD80 fusion protein
mdfqvqifsfflisasvimsrgvdivltqspaslavslgqratiscrasesveyyvtslmqwyqqkpgqp
pkllisaasnvesgvparfsgsgsgtdfslnihpveeddiamyfcqqsrkvpwtfgggtkleikrggggsggggsggggsqvq
lkesgpglvapsqslsitctvsgfsltgygvnwvrqppgkglewlgmiwgdgstdynsalksrlsitkdnsksqvflkmflslqt
ddtaryycardgysnfhyyvmdywgqgtsvtvssdlepkssdkthtsppspapellggssvflfppkpkdtlmisrtpevtcv
vvdvshedpevkfuwyvdgvevhnaktkpreeqynstyrvvsvltvlhqdwlngkeykckvsnkalpapiektiskakgq
prepqvytlppsrdeltknqvsltclvkgfypsdiavewesngqpennykttppvldsdgsfflyskltvdksrwqqgnvfscs
vmhealhnhytqkslslspgkadpsnllpswaitlisvngifviccltycfaprcrerrrnerlrresvrpv
NT
10A8 scFv-hmtIgG1-CD80
aagcttatggattttcaagtgcagattttcagcttcctgctaatcagtgcttcagtcataatgtccagaggagtcg
acatccagatgacacagtctccatcctcactgtctgcatctctgggaggcaaagtcaccatcacttgcaaggcaagccaagacatta
agaagtatataggttggtaccaacacaagcctggaaaaggtcccaggctgctcatatattacacatctacattacagccaggcatcc
catcaaggttcagtggaagtgggtctgggagagattattccctcagcatcagaaacctggagcctgaagatattgcaacttattattgt
caacagtatgataatcttccattgacgttcggctcggggacaaagttggaaataaaacggggtggcggtggctcgggcggtggtg
ggtcgggtggcggcggatctgatgtacagcttcaggagtcaggacctggcctcgtgaaaccttctcagtctctgtctctcacctgctc
tgtcactggctactccatcaccagtggtttctactggaactggatccgacagtttccgggaaacaaactggaatggatgggccacat
aagccacgacggtaggaataactacaacccatctctcataaatcgaatctccatcactcgtgacacatctaagaaccagtttttcctga
agttgagttctgtgactactgaggacacagctacatatttctgtgcaagacactacggtagtagcggagctatggactactggggtca
aggaacctcagtcaccgtctcctctgatctggagcccaaatcttctgacaaaactcacacatccccaccgtccccagcacctgaact
cctggggggatcgtcagtcttcctcttccccccaaaacccaaggacaccctcatgatctcccggacccctgaggtcacatgcgtgg
tggtggacgtgagccacgaagaccctgaggtcaagttcaactggtacgtggacggcgtggaggtgcataatgccaagacaaagc
cgcgggaggagcagtacaacagcacgtaccgtgtggtcagcgtcctcaccgtcctgcaccaggactggctgaatggcaaggagt
acaagtgcaaggtctccaacaaagccctcccagcccccatcgagaaaaccatctccaaagccaaagggcagccccgagaacca
caggtgtacaccctgcccccatcccgggatgagctgaccaagaaccaggtcagcctgacctgcctggtcaaaggcttctatccca
gcgacatcgccgtggagtgggagagcaatgggcagccggagaacaactacaagaccacgcctcccgtgctggactccgacgg
ctccttcttcctctacagcaagctcaccgtggacaagagcaggtggcagcaggggaacgtcttctcatgctccgtgatgcatgagg
ctctgcacaaccactacacgcagaagagcctctccctgtctccgggtaaagcggatccttcgaacctgctcccatcctgggccatta
ccttaatctcagtaaatggaatttttgtgatatgctgcctgacctactgctttgccccaagatgcagagagagaaggaggaatgagag
attgagaagggaaagtgtacgccctgtataaatcgat
AA
10A8 scFv-hmtIgG1-CD80
mdfqvqifsfllisasvimsrgvdiqmtqspsslsaslggkvtitckasqdikkyigwyqhkpgkgprlli
yytstlqpgipsrfsgsgsgrdyslsirnlepediatyycqqydnlpltfgsgtkleikrggggsggggsggggsdvqlqesgpgl
vkpsqslsltcsvtgysitsgfywnwirqfpgnklewmghishdgrnnynpslinrisitrdtskflqfflklssvttedtatyfcar
hygssgamdywgqgtsvtvssdlepkssdkthtsppspapellggssvflfppkpkdtlmisrtpevtcvvvdvshedpevk
fnwyvdgvevhnaktkpreeqynstyrvvsvltvlhqdwlngkeykckvsnkalpapiektiskakgqprepqvytlppsr
deltknqvsltclvkgfypsdiavewesngqpennykttppvldsdgsfflyskltvdksrwqqgflvfscsvmhealhflhyt
qkslslspgkadpsnllpswaitlisvngifviccltycfaprcrerrrnerlrresvrpv
NT
500A2-hmtIgG1-CD80
atgttgtatacatctcagctccttgggcttttactcttctggatttcagcctccagaagtgacatagtgctgactca
gactccagccactctgtctctaattcctggagaaagagtcacaatgacctgtaagaccagtcagaatattggcacaatcttacactgg
tatcaccaaaaaccaaaggaggctccaagggctctcatcaagtatgcttcgcagtccattcctgggatcccctccagattcagtggc
agtggttcggaaacagatttcactctcagcatcaataacctggagcctgatgatatcggaatttattactgtcaacaaagtagaagctg
gcctgtcacgttcggtcctggcaccaagctggagataaaacggggtggcggtggctcgggcggaggtgggtcgggtggcggcg
gatctcaggtcaagctgcagcagtccggttctgaactagggaaacctggggcctcagtgaaactgtcctgcaagacttcaggctac
atattcacagatcactatatttcttgggtgaaacagaagcctggagaaagcctgcagtggataggaaatgtttatggtggaaatggtg
gtacaagctacaatcaaaaattccagggcaaggccacactgactgtagataaaatctctagcacagcctacatggaactcagcagc
ctgacatctgaggattctgccatctattactgtgcaagaaggccggtagcgacgggccatgctatggactactggggtcaggggat
ccaagttaccgtctcctctgatctggagcccaaatcttctgacaaaactcacacatccccaccgtccccagcacctgaactcctggg
gggatcgtcagtcttcctcttccccccaaaacccaaggacaccctcatgatctcccggacccctgaggtcacatgcgtggtggtgg
acgtgagccacgaagaccctgaggtcaagttcaactggtacgtggacggcgtggaggtgcataatgccaagacaaagccgcgg
gaggagcagtacaacagcacgtaccgtgtggtcagcgtcctcaccgtcctgcaccaggactggctgaatggcaaggagtacaag
tgcaaggtctccaacaaagccctcccagcccccatcgagaaaaccatctccaaagccaaagggcagccccgagaaccacaggt
gtacaccctgcccccatcccgggatgagctgaccaagaaccaggtcagcctgacctgcctggtcaaaggcttctatcccagcgac
atcgccgtggagtgggagagcaatgggcagccggagaacaactacaagaccacgcctcccgtgctggactccgacggctcctt
cttcctctacagcaagctcaccgtggacaagagcaggtggcagcaggggaacgtcttctcatgctccgtgatgcatgaggctctgc
acaaccactacacgcagaagagcctctccctgtctccgggtaaagcggatccttcgaacctgctcccatcctgggccattaccttaa
tctcagtaaatggaatttttgtgatatgctgcctgacctactgctttgccccaagatgcagagagagaaggaggaatgagagattgag
aagggaaagtgtacgccctgtataaatcgat
AA
500A2-hmtIgG1-CD80
mlytsqllglllfwisasrsdivltqtpatlslipgervtmtcktsqnigtilhwyhqkpkeapralikyasqsi
pgipsrfsgsgsetdfilsinnlepddigiyycqqsrswpvtfgpgtkleikrggggsggggsggggsqvklqqsgselgkpga
svklscktsgyiftdhyiswvkqkpgeslqwignvyggnggtsynqkfqgkatltvdkisstaymelssltsedsaiyycarrp
vatghamdywgqgiqvtvssdlepkssdkthtsppspapellggssvflfppkpkdtlmisrtpevtcvvvdvshedpevkf
nwyvdgvevhnaktkpreeqynstyrvvsvltvlhqdwlngkeykckvsnkalpapiektiskakgqprepqvytlppsrd
eltknqvsltclvkgfypsdiavewesngqpennykttppvldsdgsfflyskltvdksrwqqgnvfscsvmhealhnhytq
kslslspgkadpsnllpswaitlisvngifviccltycfaprcrerrrnerlrresvrpv
NT
2H7 scFv MTH(SSS) WTCLI2CH3
aagcttgccgccatggattttcaagtgcagattttcagcttcctgctaatcagtgcttcagtcataattgccagag
gacaaattgttctctcccagtctccagcaatcctgtctgcatctccaggggagaaggtcacaatgacttgcagggccagctcaagtg
taagttacatgcactggtaccagcagaagccaggatcctcccccaaaccctggatttatgccccatccaacctggcttctggagtcc
ctgctcgcttcagtggcagtgggtctgggacctcttactctctcacaatcagcagagtggaggctgaagatgctgccacttattactg
ccagcagtggagttttaacccacccacgttcggtgctgggaccaagctggagctgaaagatggcggtggctcgggcggtggtgg
atctggaggaggtgggagctctcaggcttatctacagcagtctggggctgagctggtgaggcctggggcctcagtgaagatgtcct
gcaaggcttctggctacacatttaccagttacaatatgcactgggtaaagcagacacctagacagggcctggaatggattggagct
atttatccaggaaatggtgatacttcctacaatcagaagttcaagggcaaggccacactgactgtagacaaatcctccagcacagcc
tacatgcagctcagcagcctgacatctgaagactctgcggtctatttctgtgcaagagtggtgtactatagtaactcttactggtacttc
gatgtctggggcacagggaccacggtcaccgtctcttctgatcaggagcccaaatcttctgacaaaactcacacatccccaccgtc
cccagcacctgaactcctggggggaccgtcagtcttcctcttccccccaaaacccaaggacaccctcatgatctcccggacccctg
aggtcacatgcgtggtggtggacgtgagccacgaagaccctgaggtcaagttcaactggtacgtggacggcgtggaggtgcata
atgccaagacaaagccgcgggaggagcagtacaacagcacgtaccgtgtggtcagcgtcctcaccgtcctgcaccaggactgg
ctgaatggcaaggagtacaagtgcaaggtctccaacaaagccctcccagcccccatcgagaaaacaatctccaaagccaaaggg
cagccccgagaaccacaggtgtacaccctgcccccatcccgggatgagctgaccaagaaccaggtcagcctgacctgcctggtc
aaaggcttctatcccagcgacatcgccgtggagtgggagagcaatgggcagccggagaacaactacaagaccacgcctcccgt
gctggactccgacggctccttcttcctctacagcaagctcaccgtggacaagagcaggtggcagcaggggaacgtcttctcatgct
ccgtgatgcatgaggctctgcacaaccactacacgcagaagagcctctccctgtctccgggtaaatgatctaga
2H7 scFv MTH(SSS)WTCH2CH3 protein sequence:
mdfqvqifsfllisasviiargqivlsqspailsaspgekvtmtcrasssvsymhwyqqkpgsspkpwiy
apsnlasgvparfsgsgsgtsysltisrveaedaatyycqqwsfnpptfgagtklelkdgggsggggsggggssqaylqqsgae
lvrpgasvkmsckasgytftsynmhwvkqtprqglewigaiypgngdtsynqkfkgkatltvdkssstaymqlssltsedsa
vyfcarvvyysnsywyfdvwgtgttvtvssdqepkssdkthtsppspapellggpsvflfppkpkdtlmisrtpevtcvvvdv
shedpevkthwyvdgvevhnaktkpreeqynstyrvvsvltvlhqdwlngkeykckvsnkalpapiektiskakgqprep
qvytlppsrdeltknqvsltclvkgfypsdiavewesngqpennykttppvldsdgsfflyskltvdksrwqqgnvfscsvmh
ealhnhytqkslslspgk
HuIgGMHncsl (oligo for Css)
gtt gtt gat cag gag ccc aaa tct tgt gac aaa act cac
HuIgGMHncs2 (oligo for sCs=ncs2)
gtt gtt gat cag gag ccc aaa tct tct gac aaa act cac aca tgc cca ccg
HuIgGMHncs3 (oligo for ssC=ncs3)
gtt gtt gat cag gag ccc aaa tct tct gac aaa act cac aca tct cca ccg tgc cca gca
cct g
hIgGWT3xba (3′ oligo for above mutation introduction)
gtt gtt tct aga tca ttt acc cgg aga cag gga gag gct ctt ctg cgt gta g
Vhser11: (oligo for Leu to ser at vH11)
gga ggt ggg agc tct cag gct tat cta cag cag tct ggg gct gag tcg gtg agg cc
huIgG1-3′ (3′ oligo to amplify IgG1C regions, 3′ end of CH3)
gtc tct aga cta tca ttt acc cgg aga cag
hulgA/Gchim5 (oligo for pcr#1)
cca tct ccc tca act cca cct acc cca tct ccc tca tgc gca cct gaa ctc ctg
huIgAhg-5′ (oligo for pcr#2)
gtt gtt gat cag cca gtt ccc tca act cca cct acc cca tct ccc caa ct
huIgA3′
gtt gtt tct aga tta tca gta gca ggt gcc gtc cac ctc cgc cat gac aac
2H7 scFv JgAH LGG WT CH2CH3, 2H7 scFv with IgA hinge and WT
CH2 and CH3
aagcttgccgccatggattttcaagtgcagattttcagcttcctgctaatcagtgcttcagtcataattgccagag
gacaaattgttctctcccagtctccagcaatcctgtctgcatctccaggggagaaggtcacaatgacttgcagggccagctcaagtg
taagttacatgcactggtaccagcagaagccaggatcctcccccaaaccctggatttatgccccatccaacctggcttctggagtcc
ctgctcgcttcagtggcagtgggtctgggacctcttactctctcacaatcagcagagtggaggctgaagatgctgccacttattactg
ccagcagtggagttttaacccacccacgttcggtgctgggaccaagctggagctgaaagatggcggtggctcgggcggtggtgg
atctggaggaggtgggagctctcaggcttatctacagcagtctggggctgagctggtgaggcctggggcctcagtgaagatgtcct
gcaaggcttctggctacacatttaccagttacaatatgcactgggtaaagcagacacctagacagggcctggaatggattggagct
atttatccaggaaatggtgatacttcctacaatcagaagttcaagggcaaggccacactgactgtagacaaatcctccagcacagcc
tacatgcagctcagcagcctgacatctgaagactctgcggtctatttctgtgcaagagtggtgtactatagtaactcttactggtacttc
gatgtctggggcacagggaccacggtcaccgtctctgatcagccagttccctcaactccacctaccccatctccctcaactccacct
accccatctccctcatgcgcacctgaactcctggggggaccgtcagtcttcctcttccccccaaaacccaaggacaccctcatgatc
tcccggacccctgaggtcacatgcgtggtggtggacgtgagccacgaagaccctgaggtcaagttcaactggtacgtggacggc
gtggaggtgcataatgccaagacaaagccgcgggaggagcagtacaacagcacgtaccgtgtggtcagcgtcctcaccgtcctg
caccaggactggctgaatggcaaggagtacaagtgcaaggtctccaacaaagccctcccagcccccatcgagaaaacaatctcc
aaagccaaagggcagccccgagaaccacaggtgtacaccctgcccccatcccgggatgagctgaccaagaaccaggtcagcct
gacctgcctggtcaaaggcttctatcccagcgacatcgccgtggagtgggagagcaatgggcagccggagaacaactacaaga
ccacgcctcccgtgctggactccgacggctccttcttcctctacagcaagctcaccgtggacaagagcaggtggcagcagggga
acgtcttctcatgctccgtgatgcatgaggctctgcacaaccactacacgcagaagagcctctccctgtctccgggtaaatgatctag
a
2H7 scFv IgAH IGG WT CH2CH3 protein sequence
mdfqvqifsfllisasviiargqivlsqspailsaspgekvtmterasssvsymhwyqqkpgsspkpwiy
apsnlasgvparfsgsgsgtsysltisrveaedaatyycqqwsfnpptfgagtklelkdgggsggggsggggssqaylqqsgae
lvrpgasvkmsckasgytftsynmhwvkqtprqglewigaiypgngdtsynqkfkgkatltvdkssstaymqlssltsedsa
vyfcarvvyysnsywyfdvwgtgttvtvsdqpvpstpptpspstpptpspscapellggpsvflfppkpkdtlmisrtpevtcv
vvdvshedpevkthwyvdgvevhnaktkpreeqynstyrvvsvltvlhqdwlngkeykckvsnkalpapiektiskakgq
prepqvytlppsrdeltknqvsltclvkgfypsdiavewesngqpennykttppvldsdgsfflyskltvdksrwqqgnvfscs
vmhealhnhytqkslslspgk
NT
2H7 scFv IgAH IgACH2CH3 (2H7 scFv IgAhinge and IgA CH2 and CH3)
aagcttgccgccatggattttcaagtgcagattttcagcttcctgctaatcagtgcttcagtcataattgccagag
gacaaattgttctctcccagtctccagcaatcctgtctgcatctccaggggagaaggtcacaatgacttgcagggccagctcaagtg
taagttacatgcactggtaccagcagaagccaggatcctcccccaaaccctggatttatgccccatccaacctggcttctggagtcc
ctgctcgcttcagtggcagtgggtctgggacctcttactctctcacaatcagcagagtggaggctgaagatgctgccacttattactg
ccagcagtggagttttaacccacccacgttcggtgctgggaccaagctggagctgaaagatggcggtggctcgggcggtggtgg
atctggaggaggtgggagctctcaggcttatctacagcagtctggggctgagctggtgaggcctggggcctcagtgaagatgtcct
gcaaggcttctggctacacatttaccagttacaatatgcactgggtaaagcagacacctagacagggcctggaatggattggagct
atttatccaggaaatggtgatacttcctacaatcagaagttcaagggcaaggccacactgactgtagacaaatcctccagcacagcc
tacatgcagctcagcagcctgacatctgaagactctgcggtctatttctgtgcaagagtggtgtactatagtaactcttactggtacttc
gatgtctggggcacagggaccacggtcaccgtctcttctgatcagccagttccctcaactccacctaccccatctccctcaactcca
cctaccccatctccctcatgctgccacccccgactgtcactgcaccgaccggccctcgaggacctgctcttaggttcagaagcgat
cctcacgtgcacactgaccggcctgagagatgcctcaggtgtcaccttcacctggacgccctcaagtgggaagagcgctgttcaa
ggaccacctgaccgtgacctctgtggctgctacagcgtgtccagtgtcctgccgggctgtgccgagccatggaaccatgggaaga
ccttcacttgcactgctgcctaccccgagtccaagaccccgctaaccgccaccctctcaaaatccggaaacacattccggcccgag
gtccacctgctgccgccgccgtcggaggagctggccctgaacgagctggtgacgctgacgtgcctggcacgtggcttcagcccc
aaggatgtgctggttcgctggctgcaggggtcacaggagctgccccgcgagaagtacctgacttgggcatcccggcaggagccc
agccagggcaccaccaccttcgctgtgaccagcatactgcgcgtggcagccgaggactggaagaagggggacaccttctcctg
catggtgggccacgaggccctgccgctggccttcacacagaagaccatcgaccgcttggcgggtaaacccacccatgtcaatgt
gtctgttgtcatggcggaggtggacggcacctgctactgataatctaga
AA
2H7 scFv IgAH IgACH2CH3 (2H7 scFv IgA hinge and IgA CH2 and CH3)
mdfqvqifsfllisasviiargqivlsqspailsaspgekvtmtcrasssvsymhwyqqkpgsspkpwiy
apsnlasgvparfsgsgsgtsysltisrveaedaatyycqqwsfnpptfgagtklelkdgggsggggsggggssqaylqqsgae
lvrpgasvkmsckasgytftsynmhwvkqtprqglewigaiypgngdtsynqkfkgkatltvdkssstaymqlssltsedsa
vyfcarvvyysnsywyfdvwgtgttvtvssdqpvpstpptpspstpptpspscchprlslhrpaledlllgseailtctltglrdas
gvtftwtpssgksavqgppdrdlcgcysvssvlpgcaepwnhgktftctaaypesktpltatlsksgflttitpevhllpppseelal
nelvtltclargfspkdvlvrwlqgsqelprekyltwasrqepsqgtttfavtsilrvaaedwkkgdtfscmvghealplaftqkti
drlagkpthvnvsvvmaevdgtcy
IgA hinge-CH2—CH3 (Human IgA tail, full length)
tgatcagccagttccctcaactccacctaccccatctccctcaactccacctaccccatctccctcatgctgcc
acccccgactgtcactgcaccgaccggccctcgaggacctgctcttaggttcagaagcgatcctcacgtgcacactgaccggcct
gagagatgcctcaggtgtcaccttcacctggacgccctcaagtgggaagagcgctgttcaaggaccacctgaccgtgacctctgt
ggctgctacagcgtgtccagtgtcctgccgggctgtgccgagccatggaaccatgggaagaccttcacttgcactgctgcctaccc
cgagtccaagaccccgctaaccgccaccctctcaaaatccggaaacacattccggcccgaggtccacctgctgccgccgccgtc
ggaggagctggccctgaacgagctggtgacgctgacgtgcctggcacgtggcttcagccccaaggatgtgctggttcgctggct
gcaggggtcacaggagctgccccgcgagaagtacctgacttgggcatcccggcaggagcccagccagggcaccaccaccttc
gctgtgaccagcatactgcgcgtggcagccgaggactggaagaagggggacaccttctcctgcatggtgggccacgaggccct
gccgctggccttcacacagaagaccatcgaccgcttggcgggtaaacccacccatgtcaatgtgtctgttgtcatggcggaggtgg
acggcacctgctactgataatctaga
IgA hinge-CH2—CH3 protein sequence, (Human IgA tail, full length)
Dqpvpstpptpspstpptpspscchprlslhrpaledlllgseailtctltglrdasgvtftwtpssgksavqg
ppdrdlcgeysvssvlpgcaepwnhgktftctaaypesktpltatlsksgntfrpeVhllpppseelalnelvtltelargfspkdvl
vrwlqgsqelprekyltwasrqepsqgtttfavtsilrvaaedwkkgdtfsemvghealplaftqktidrlagkpthvnvsvvm
aevdgtcy
Human J Chain:
agatctcaagaagatgaaaggattgttcttgttgacaacaaatgtaagtgtgcccggattacttccaggatcat
ccgttcttcegaagatcctaatgaggacattgtggagagaaacatccgaattattgttcctctgaacaacagggagaatatctctgatc
ccacctcaccattgagaaccagatttgtgtaccatttgtctgacctcagctgtaaaaaatgtgatcctacagaagtggagctggataat
cagatagttactgctacccagagcaatatctgtgatgaagacagtgctacagagacctgctacacttatgacagaaacaagtgctac
acagctgtggtcccactcgtatatggtggtgagaccaaaatggtggaaacagccttaaccccagatgcctgctatcctgactaatcta
ga
Human J Chain polypeptide
rsqederivlvdnkckcaritsriirssedpnediverniriivplnnrenisdptsplrtrfvyhlsdlsckkc
dpteveldnqivtatqsnicdedsatctcytydrnkcytavvplvyggctkmvetaltpdacyp
HUICH5nl (J chain 5′ primer)
gtt gtt aga tct caa gaa gat gaa agg att gtt ctt
HUICH3 (J chain 3′ primer-antisense)
gtt gtt tct aga tta gtc agg ata gca ggc ate tgg
4 carboxy terminal amino acids deleted from IgA CH3
GTCY
IgAH LgAT4 Human IgA tail, truncated (3T1)-(missing last 4 amino acids from carboxy terminus)
tgatcagccagttccctcaactccacctaccccatctccctcaactccacctaccccatctccctcatgctgcc
acccccgactgtcactgcaccgaccggccctcgaggacctgctcttaggttcagaagcgatcctcacgtgcacactgaccggcct
gagagatgcctcaggtgtcaccttcacctggacgccctcaagtgggaagagcgctgttcaaggaccacctgaccgtgacctctgt
ggctgctacagcgtgtccagtgtcctgccgggctgtgccgagccatggaaccatgggaagaccttcacttgcactgctgcctaccc
cgagtccaagaccccgctaaccgccaccctctcaaaatccggaaacacattccggcccgaggtccacctgctgccgccgccgtc
ggaggagctggccctgaacgagctggtgacgctgacgtgcctggcacgtggcttcagccccaaggatgtgctggttcgctggct
gcaggggtcacaggagctgccccgcgagaagtacctgacttgggcatcccggcaggagcccagccagggcaccaccaccttc
gctgtgaccagcatactgcgcgtggcagccgaggactggaagaagggggacaccttctcctgcatggtgggccacgaggccct
gccgctggccttcccacagaagaccatcgaccgcttggcgggtaaacccacccatgtcaatgtgtctgttgtcatggcggaggtgg
actgataatctaga
IgAH IgAT4 protein sequence:
Dujvpstpptpspstpptpspscchprlslhrpaledlllgseailtctltglrdasgvtftwtpssgksavqg
ppdrdlcgcysvssvlpgcaepwnhgktftctaaypesktpltatlsksgntfrpeVhllpppseelalnelvtltelargfspkdvl
vrwlqgsqelprekyltwasrqepsqgtttfavtsilrvaaedwkkgdtfscmvghealplaftqktidrlagkpthvnvsvvm
aevd
HUIGA3T1 (Oligo 3′: to delete 4 amino acids at carboxy end of IgA CH3)
gtt gtt tct aga tta tca gtc cac ctc cgc cat gac aac aga cac
HUIGA3T2: (oligo to delete 14 aa at end of IgA -T4)
gtt gtt tct aga tta tca ttt acc cgc caa gcg gtc gat ggt ett
NT
2H7scFvIgAHIgAT4
(2H7 scFv IgA 3T1 construct)--truncates the CH3 domain at the 3′end
aagcttgccgccatggattttcaagtgcagattttcagcttcctgctaatcagtgcttcagtcataattgccagag
gacaaattgttctetcccagtctccagcaatcctgtctgcatctccaggggagaaggtcacaatgacttgcagggccagctcaagtg
taagttacatgcactggtaccagcagaagccaggatcctcccccaaaccctggatttatgccccatccaacctggcttctggagtcc
ctgctcgcttcagtggcagtgggtctgggacctcttactctctcacaatcagcagagtggaggctgaagatgctgccacttattactg
ccagcagtggagttttaacccacccacgttcggtgctgggaccaagctggagctgaaagatggcggtggctcgggcggtggtgg
atctggaggaggtgggagctctcaggcttatctacagcagtctggggctgagctggtgaggcctggggcctcagtgaagatgtcct
gcaaggcttctggctacacatttaccagttacaatatgcactgggtaaagcagacacctagacagggcctggaatggattggagct
atttatccaggaaatggtgatacttcctacaatcagaagttcaagggcaaggccacactgactgtagacaaatcctccagcacagcc
tacatgcagctcagcagcctgacatctgaagactctgcggtctatttctgtgcaagagtggtgtactatagtaactcttactggtacttc
gatgtctggggcacagggaccacggtcaccgtctcttctgatcagccagttccctcaactccacctaccccatctccctcaactcca
cctaccccatctccctcatgctgccacccccgactgtcactgcaccgaccggccctcgaggacctgctcttaggttcagaagcgat
cctcacgtgcacactgaccggcctgagagatgcctcaggtgtcaccttcacctggacgccctcaagtgggaagagcgctgttcaa
ggaccacctgaccgtgacctctgtggctgctacagcgtgtccagtgtcctgccgggctgtgccgagccatggaaccatgggaaga
ccttcacttgcactgctgcctaccccgagtccaagaccccgctaaccgccaccctctcaaaatccggaaacacattccggcccgag
gtccacctgctgccgccgccgtcggaggagctggccctgaacgagctggtgacgctgacgtgcctggcacgtggcttcagcccc
aaggatgtgctggttcgctggctgcaggggtcacaggagctgccccgcgagaagtacctgacttgggcatcccggcaggagccc
agccagggcaccaccaccttcgctgtgaccagcatactgcgcgtggcagccgaggactggaagaagggggacaccttctcctg
catggtgggccacgaggccctgccgctggccttcacacagaagaccatcgaccgcttggcgggtaaacccacccatgtcaatgt
gtctgttgtcatggcggaggtggactgataatctaga
AA
2H7 scFv IgAH-T4
mdfqvqifsfllisasviiargqivlsqspailsaspgekvtmtcrasssvsymhwyqqkpgsspkpwiy
apsnlasgvparfsgsgsgtsysltisrveaedaatyyeqqwsfnpptfgagtklelkdgggsggggsggggssqaylqqsgae
lvrpgasvkmsekasgytftsynmhwvkqtprqglewigaiypgngdtsynqkfkgkatltvdkssstaymqlssltsedsa
vyfearvvyysnsywyfdvwgtgttvtvssdqpvpstpptpspstpptpspscchprlslhrpaledlllgseailtctltglrdas
gvtftwtpssgksavqgppdrdlcgcysvssvlpgcacpwnhgktftctaaypesktpltatlsksgntfrpeVhllpppseelal
nelvtltclargfspkdvlvrwlqgsqelprekyltwasrqepsqgtttfavtsilrvaaedwkkgdtfscmvghealplaftqkti
drlagkpthvnvsvvmaevd
14 amino acids deleted from IgAH-T4 (so that total of 18 amino acids deleted from wild type IgA CH3
PTHVNVSVVMAEVD
IgAH IgA-T 8 (Human IgA Tail truncated, 3T2)
Tgatcagccagttccctcaactccacctaccccatctccctcaactccacctaccccatctccctcatgctgcc
acccccgactgtcactgcaccgaccggccctcgaggacctgctcttaggttcagaagcgatcctcacgtgcacactgaccggcct
gagagatgcctcaggtgtcaccttcacctggacgccctcaagtgggaagagcgctgttcaaggaccacctgaccgtgacctctgt
ggctgctacagcgtgtccagtgtcctgccgggctgtgccgagccatggaaccatgggaagaccttcacttgcactgctgcctaccc
cgagtccaagaccccgctaaccgccaccctctcaaaatccggaaacacattccggcccgaggtccacctgctgccgccgccgtc
ggaggagctggccctgaacgagctggtgacgctgacgtgcctggcacgtggcttcagccccaaggatgtgctggttcgctggct
gcaggggtcacaggagctgccccgcgagaagtacctgacttgggcatcccggcaggagcccagccagggcaccaccaccttc
gctgtgaccagcatactgcgcgtggcagccgaggactggaagaagggggacaccttctcctgcatggtgggccacgaggccct
gccgctggccttcacacagaagaccatcgaccgcttggcgggtaaa
IgAH LgA-T18 protein sequence:
dqpvpstpptpspstpptpspscchprlslhrpaledlllgseailtcthglrdasgvtftwtpssgksavqg
ppdrdlcgcysvssvlpgcacpwnhgktftctaaypesktpltatlsksgntfrpeVhllpppseelalnelvtltclargfspkdvl
vrwlqgsqelprekyltwasrqepsqgtttfavtsilrvaaedwkkgdtfscmvghealplaftqktidrlagk
NT
2H7 scFv IgAH IgAT18: (Human IgA Tail truncated, 3T2.)
aagcttgccgccatggattttcaagtgcagattttcagcttcctgctaatcagtgcttcagtcataattgccagag
gacaaattgttctctcccagtctccagcaatcctgtctgcatctccaggggagaaggtcacaatgacttgcagggccagctcaagtg
taagttacatgcactggtaccagcagaagccaggatcctcccccaaaccctggatttatgccccatccaacctggcttctggagtcc
ctgctcgcttcagtggcagtgggtctgggacctcttactctctcacaatcagcagagtggaggctgaagatgctgccacttattactg
ccagcagtggagttttaacccacccacgttcggtgctgggaccaagctggagctgaaagatggcggtggctcgggcggtggtgg
atctggaggaggtgggagctctcaggcttatctacagcagtctggggctgagctggtgaggcctggggcctcagtgaagatgtcct
gcaaggcttctggctacacatttaccagttacaatatgcactgggtaaagcagacacctagacagggcctggaatggattggagct
atttatccaggaaatggtgatacttcctacaatcagaagttcaagggcaaggccacactgactgtagacaaatcctccagcacagcc
tacatgcagctcagcagcctgacatctgaagactctgcggtctatttctgtgcaagagtggtgtactatagtaactcttactggtacttc
gatgtctggggcacagggaccacggtcaccgtctcttctgatcagccagttccctcaactccacctaccccatctccctcaactcca
cctaccccatctccctcatgctgccacccccgactgtcactgcaccgaccggccctcgaggacctgctcttaggttcagaagcgat
cctcacgtgcacactgaccggcctgagagatgcctcaggtgtcaccttcacctggacgccctcaagtgggaagagcgctgttcaa
ggaccacctgaccgtgacctctgtggctgctacagcgtgtccagtgtcctgccgggctgtgccgagccatggaaccatgggaaga
ccttcacttgcactgctgcctaccccgagtccaagaccccgctaaccgccaccctctcaaaatccggaaacacattccggcccgag
gtccacctgctgccgccgccgtcggaggagctggccctgaacgagctggtgacgctgacgtgcctggcacgtggcttcagcccc
aaggatgtgctggttcgctggctgcaggggtcacaggagctgccccgcgagaagtacctgacttgggcatcccggcaggagccc
agccagggcaccaccaccttcgctgtgaccagcatactgcgcgtggcagccgaggactggaagaagggggacaccttctcctg
catggtgggccacgaggccctgccgctggccttcacacagaagaccatcgaccgcttggcgggtaaa
AA:
2H7 scFv IgAH IgAT18:
mdfqvqifsflisasviiargqivlsqspailsaspgekvtmtcrasssvsymhwyqqkpgsspkpwiy
apsnlasgvparfsgsgsgtsysltisrveaedaatyycqqwsfnpptfgagtklelkdgggsggggsggggssqaylqqsgae
lvrpgasvkmsckasgytftsynmhwvkqtprqglewigaiypgngdtsynqkfkgkatltvdkssstaymqlssltsedsa
vyfcarvvyysnsywyfdvwgtgttvtvssdqpvpstpptpspstpptpspscchprlslhrpaledlllgseailtctltglrdas
gvtftwtpssgksavqgppdrdlcgcysvssvlpgcacpwnhgktftctaaypesktpltatlsksgntfrpevhllpppseelal
nelvtltclargfspkdvlvrwlqgsqelprekyltwasrqepsqgtttfavtsilrvaaedwkkgdtfscrnvghealplaftqkti
drlagk
CTLA-4 IgG WTH WTCH2CH3 (Human-oncoMLp-CTLA4EC-hIgGWT)
Nucleotide sequence:
gcaacctacatgatggggaatgagttgaccttcctagatgattccatctgcacgggcacctccagtggaaatc
aagtgaacctcactatccaaggactgagggccatggacacgggactctacatctgcaaggtggagctcatgtacccaccgccata
ctacctgggcataggcaacggaacccagatttatgtaattgatccagaaccgtgcccagattctgatcaacccaaatcttgtgacaaa
actcacacatgcccaccgtgcccagcacctgaactcctggggggaccgtcagtcttcctcttccccccaaaacccaaggacaccct
catgatctcccggacccctgaggtcacatgcgtggtggtggacgtgagccacgaagaccctgaggtcaagttcaactggtacgtg
gacggcgtggaggtgcataatgccaagacaaagccgcgggaggagcagtacaacagcacgtaccgtgtggtcagcgtcctcac
cgtcctgcaccaggactggctgaatggcaaggagtacaagtgcaaggtctccaacaaagccctcccagcccccatcgagaaaac
aatctccaaagccaaagggcagccccgagaaccacaggtgtacaccctgcccccatcccgggatgagctgaccaagaaccagg
tcagcctgacctgcctggtcaaaggcttctatcccagcgacatcgccgtggagtgggagagcaatgggcagccggagaacaact
acaagaccacgcctcccgtgctggactccgacggctccttcttcctctacagcaagctcaccgtggacaagagcaggtggcagca
ggggaacgtcttctcatgctccgtgatgcatgaggctctgcacaaccactacacgcagaagagcctctccctgtctccgggtaaatg
a
CTLA-4 IgG WTH WTCH2CH3 protein sequence:
mgvl1tqrtllslv1allfpsmasmamhvaqavvlassrgtasfvceyaspgkatevrvtvlrqadsqvt
evcaatymmgnehflddsictgtssgnqvnhiqglramdtglyickvelmypppyylgigngtqiyvidpepcpdsdqpks
cdkthtcppcpapellggpsvflfppkpkdtlmisrtpevtcvvvdvshedpevkfnwyvdgvevhnaktkpreeqynstyr
vvsvhvlhqdwlngkeykckvsnkalpapiektiskakgqprepqvytlppsrdehknqvsltclvkgfypsdiavewesn
gqpennykttppvldsdgsfflyskltvdksrwqqgnvfscsvmhealhnhytqkslslspgk
Human OncoM leader peptide+CTLA4 EC (BclI)
Atgggggtactgctcacacagaggacgctgctcagtctggtccttgcactcctgtttccaagcatggcgagc
atggcaatgcacgtggcccagcctgctgtggtactggccagcagccgaggcatcgccagctttgtgtgtgagtatgcatctccagg
caaagccactgaggtccgggtgacagtgcttcggcaggctgacagccaggtgactgaagtctgtgcggcaacctacatgatggg
gaatgagttgaccttcctagatgattccatctgcacgggcacctccagtggaaatcaagtgaacctcactatccaaggactgagggc
catggacacgggactctacatctgcaaggtggagctcatgtacccaccgccatactacctgggcataggcaacggaacccagattt
atgtaattgatccagaaccgtgcccagattctgatcaa
Human OncoM leader peptide+CTLA4 EC peptide sequence:
mgvlltqrtllslvlallfpsmasmamhvaqpavvlassrgtasfvceyaspgkatevrvtvlrqadsqvt
evcaatymmgneltflddsictgtssgnqvnltiqglramdtglyickvelmypppyylgigngtqiyvidpepcpdsdq
Human OncoM leader peptide nucleotide
atgggggtactgctcacacagaggacgctgctcagtctggtccttgcactcctgtttccaagcatggcgagc
atg
Human OncoM leader peptide sequence:
Mgvlltqrtllslvlallfpsm
NT
Human CTLA4 EC (no Lp)
Gcaatgcacgtggcccagcctgctgtggtactggccagcagccgaggcatcgccagctttgtgtgtgagta
tgcatctccaggcaaagccactgaggtccgggtgacagtgcttcggcaggctgacagccaggtgactgaagtctgtgcggcaac
ctacatgacggggaatgagttgaccttcctagatgattccatctgcacgggcacctccagtggaaatcaagtgaacctcactatcca
aggactgagggccatggacacgggactctacatctgcaaggtggagctcatgtacccaccgccatactacctgggcataggcaa
cggaacccagatttatgtaattgatccagaaccgtgcccagattct
AA
Human CTLA4 EC (no Lp)
Amhvaqpavvlassrgtasfvceyaspgkatevrvtvlrcladsqvtevcaatymtgfleltflddsictgts
sgnqvnltiqglramdtglyickvelmypppyylgigngtqiyvidpepcpds
NT
Human CTLA4 IgG MTH (SSS) MTCH2CH3
Atgggggtactgctcacacagaggacgctgctcagtctggtccttgcactcctgtttccaagcatggcgagc
atggcaatgcacgtggcccagcctgctgtggtactggccagcagccgaggcatcgccagctttgtgtgtgagtatgcatctccagg
caaagccactgaggtccgggtgacagtgcttcggcaggctgacagccaggtgactgaagtctgtgcggcaacctacatgatggg
gaatgagttgaccttcctagatgattccatctgcacgggcacctccagtggaaatcaagtgaacctcactatccaaggactgagggc
catggacacgggactctacatctgcaaggtggagctcatgtacccaccgccatactacctgggcataggcaacggaacccagattt
atgtaattgatccagaaccgtgcccagattctgatcaacccaaatcttctgacaaaactcacacatccccaccgtccccagcacctga
actcctggggggatcgtcagtcttcctcttccccccaaaacccaaggacaccctcatgatctcccggacccctgaggtcacatgcgt
ggtggtggacgtgagccacgaagaccctgaggtcaagttcaactggtacgtggacggcgtggaggtgcataatgccaagacaaa
gccgcgggaggagcagtacaacagcacgtaccgtgtggtcagcgtcctcaccgtcctgcaccaggactggctgaatggcaagg
agtacaagtgcaaggtctccaacaaagccctcccagcccccatcgagaaaacaatctccaaagccaaagggcagccccgagaa
ccacaggtgtacaccctgcccccatcccgggatgagctgaccaagaaccaggtcagcctgacctgcctggtcaaaggcttctatc
ccagcgacatcgccgtggagtgggagagcaatgggcagccggagaacaactacaagaccacgcctcccgtgctggactccga
cggctccttcttcctctacagcaagctcaccgtggacaagagcaggtggcagcaggggaacgtcttctcatgctccgtgatgcatg
aggctctgcacaaccactacacgcagaagagcctctccctgtctccgggtaaatga
AA
Human CTLA4 IgG MTH (SSS) MTCH2CH3
Mgvlltqrtllslvlallfpsmasmamhvaqpavvlassrgtasfvceyaspgkatevrvtvlrqadsqvt
evcaatymmgneltflddsictgtssgnqvnltiqglramdtglyickvelmypppyylgigngtqiyvidpepcpdsdqpks
sdkthtsppspapellggssvflfppkpkdtlmisrtpevtcvvvdvshedpevkffiwyvdgveVhnaktkpreeqynstyr
vvsvltvlhqdwlngkeykckvsnkalpapiektiskakgqprepqvytlppsrdeltknqvsltclvkgfypsdiavewesn
gqpennykttppvldsdgsfflyskltvdksrwqqgnvfscsvmhealhnhytqkslslspgk
CTLA-4 IgAH IgACH2CH3 (Human-oncoMLp-CTLA4EC-IgA)
Nucleotide sequence:
atgggggtactgctcacacagaggacgctgctcagtctggtccttgcactcctgtttccaagcatggcgagc
atggcaatgcacgtggcccagcctgctgtggtactggccagcagccgaggcatcgccagctttgtgtgtgagtatgcatctccagg
caaagccactgaggtccgggtgacagtgcttcggcaggctgacagccaggtgactgaagtctgtgcggcaacctacatgatggg
gaatgagttgaccttcctagatgattccatctgcacgggcacctccagtggaaatcaagtgaacctcactatccaaggactgagggc
catggactcgggactctacatctgcaaggtggagctcatgtacccaccgccatactacctgggcataggcaacggaacccagattt
atgtaattgatccagaaccgtgcccagattctgatcagccagttccctcaactccacctaccccatctccctcaactccacctacccca
tctccctcatgctgccacccccgactgtcactgcaccgaccggccctcgaggacctgctcttaggttcagaagcgatcctcacgtgc
acactgaccggcctgagagatgcctcaggtgtcaccttcacctggacgccctcaagtgggaagagcgctgttcaaggaccacctg
accgtgacctctgtggctgctacagcgtgtccagtgtcctgccgggctgtgccgagccatggaaccatgggaagaccttcacttgc
actgctgcctaccccgagtccaagaccccgctaaccgccaccctctcaaaatccggaaacacattccggcccgaggtccacctgc
tgccgccgeegtcggaggagctggccctgaacgagctggtgacgctgacgtgcctggcacgtggcttcagccccaaggatgtgc
tggttegctggctgcaggggtcacaggagctgccccgcgagaagtacctgacttgggcatcccggcaggagcccagccagggc
accaccaccttcgctgtgaccagcatactgcgcgtggcagccgaggactggaagaagggggacaccttctcctgcatggtgggc
cacgaggccctgccgctggccttcacacagaagaccatcgaccgcttggcgggtaaacccacccatgtcaatgtgtctgttgtcat
ggcggaggtggacggcacctgctactgataatctaga
CTLA-4 IgAH IgACH2CH3 protein sequence:
mgvlltqrtllslvlallfpsmasmamhvaqpavvlassrgtasfvceyaspgkatevrvtvlrqadsqvt
evcaatymmgneltflddsictgtssgnqvnhiqglramdtglyickvelmypppyylgigngtqiyvidpepcpdsdqpv
pstpptpspstpptpspscchprlslhrpaledlllgseailtctltglrdasgvtftwipssgksavqgppdrdlcgcysvssvlpg
cacpwnhgktftctaaypesktpltatlsksgntfrpevhllpppseelalnelvtltclargfspkdvlvrwlqgsqelprekylt
wasrqepsqgtttfavtsilrvaaedwkkgdtfscmvghealplafiqktidrlagkpthvnvsvvmaevdgtcy
CTLA-4 LgAH IgA-T4 (Human-oncoMLp-CTLA4EC-IgA3T1)
Nucleotide sequence:
atgggggtactgctcacacagaggacgctgctcagtctggtccttgcactcctgtttccaagcatggcgagc
atggcaatgcacgtggcccagcctgctgtggtactggccagcagccgaggcatcgccagctttgtgtgtgagtatgcatctccagg
caaagccactgaggtccgggtgacagtgcttcggcaggctgacagccaggtgactgaagtctgtgcggcaacctacatgatggg
gaatgagttgaccttcctagatgattccatctgcacgggcacctccagtggaaatcaagtgaacctcactatccaaggactgagggc
catggacacgggactctacatctgcaaggtggagctcatgtacccaccgccatactacctgggcataggcaacggaacccagattt
atgtaattgatccagaaccgtgcccagattctgatcagccagttccctcaactccacctaccccatctccctcaactccacctacccca
tctccctcatgctgccacccccgactgtcactgcaccgaccggccctcgaggacctgctcttaggttcagaagcgatcctcacgtgc
acactgaccggcctgagagatgcctcaggtgtcaccttcacctggacgccctcaagtgggaagagcgctgttcaaggaccacctg
accgtgacctctgtggctgctacagcgtgtccagtgtcctgccgggctgtgccgagccatggaaccatgggaagaccttcacttgc
actgctgcctaccccgagtccaagaccccgctaaccgccaccctctcaaaatccggaaacacattccggcccgaggtccacctgc
tgccgccgccgtcggaggagctggccctgaacgagctggtgacgctgacgtgcctggcacgtggcttcagccccaaggatgtgc
tggttcgctggctgcaggggtcacaggagctgccccgcgagaagtacctgacttgggcatcccggcaggagcccagccagggc
accaccaccttcgctgtgaccagcatactgcgcgtggcagccgaggactggaagaagggggacaccttctcctgcatggtgggc
cacgaggccctgccgctggccttcacacagaagaccatcgaccgcttggcgggtaaacccacccatgtcaatgtgtctgttgtcat
ggcggaggtggactgataatctaga
CTLA-4 IgAH IgA-T4 protein sequence:
Mgvlltqrtllslvlallfpsmasmanthvaqpavvlassrgtasfvceyaspgkatevrvtvlrqadsqvt
evcaatymmgneltflddsictgtssgnqvnltiqglramdtglyickvelmypppyylgigngtqiyvidpepcpdsdqpv
pstpptpspstpptpspscchprlslhrpaledlllgseailtctltglrdasgvtfiwtpssgksavqgppdrdlcgcysvssvlpg
cacpwnhgktftctaaypesktpltatlsksgntfrpeVhllpppseelalnelvtltclargfspkdvlvrwlqgsqelprekylt
wasrqepsqgtttfavtsilrvaaedwkkgdtfscmvghealplaftqktidrlagkpthvnvsvvmaevd
NT
human IgG1 CH2 with 238 mutation pro→ser
cctgaactcctggggggatcgtcagtcttcctcttccccccaaaacccaaggacaccctcatgatctcccgga
cccctgaggtcacatgcgtggtggtggacgtgagccacgaagaccctgaggtcaagttcaactggtacgtggacggcgtggagg
tgcataatgccaagacaaagccgcgggaggagcagtacaacagcacgtaccgtgtggtcagcgtcetcaccgtcctgcaccagg
actggctgaatggcaaggagtacaagtgcaaggtctccaacaaagccctcccagcccccatcgagaaaaccatctccaaagcca
aag
AA
human IgGI CH2 with 238 mutation pro-→ser
pellggssvflfppkpkdtlmisrtpevtcvvvdvshedpevkfnwyvdgveVhnaktkpreeqynst
yrvvsvltvlhqdwlngkeykckvsnkalpapiektiskak
Amino acids surrounding Pro to Ser in CH2
PAPELLGGPS
Amino acids surrounding Pro to Ser in CH2
PAPELLGGSS
HIgE5Bcl
gtt gtt gat cac gtc tgc tcc agg gac ttc acc cc
hIgE3 stop
gtt gtt tct aga tta act ttt acc ggg att tac aga cac cgc tcg ctg g
hIgE3BB (leaves an open reading frame at end of gene to read into
transmembrane and cytoplasmic tail domain attached at either the BamUl or sfuI sites)
gtt gtt ttc gaa gga tcc gct tta ccg gga ttt aca gac acc gct cgc tgg
NT
human IgE Fe (CH2—CH3-CH4) ORF:
tgatcacgtctgctccagggacttcaccccgcccaccgtgaagatcttacagtcgtcctgcgacggcggcg
ggcacttccccccgaccatccagctcctgtgcctcgtctctgggtacaccccagggactatcaacatcacctggctggaggacgg
gcaggtcatggacgtggacttgtccaccgcctctaccacgcaggagggtgagctggcctccacacaaagcgagctcaccctcag
ccagaagcactggctgtcagaccgcacctacacctgccaggtcacctatcaaggtcacacctttgaggacagcaccaagaagtgt
gcagattccaacccgagaggggtgagcgcctacctaagccggcccagcccgttcgacctgttcatccgcaagtcgcccacgatc
acctgtctggtggtggacctggcacccagcaaggggaccgtgaacctgacctggtcccgggccagtgggaagcctgtgaacca
ctccaccagaaaggaggagaagcagcgcaatggcacgttaaccgtcacgtccaccctgccggtgggcacccgagactggatcg
agggggagacctaccagtgcagggtgacccacccccacctgcccagggccctcatgcggtccacgaccaagaccagcggccc
gcgtgctgccccggaagtctatgcgtttgcgacgccggagtggccggggagccgggacaagcgcaccctcgcctgcctgatcc
agaacttcatgcctgaggacatctcggtgcagtggctgcacaacgaggtgcagctcccggacgcccggcacagcacgacgcag
ccccgcaagaccaagggctccggcttcttcgtcttcagccgcctggaggtgaccagggccgaatgggagcagaaagatgagttc
atctgccgtgcagtccatgaggcagcgagcccctcacagaccgtccagcgagcggtgtctgtaaatcccggtaaagcggatcctt
cgaa
AA
human IgE Fe (CH2—CH3-CH4) ORE:
dhvesrdftpptvkilqssedggghfpptiqllelvsgytpgtinitwledgqvmdvdlstasttqegelast
qseltlsqkhwlsdrtyteqvtyqghtfedstkkeadsnprgvsaylsrpspfdlfirksptitelvvdlapskgtvflltwsrasgk
pvnhstrkeekqrngtltvtstlpvgtrdwiegctyqervthphlpralmrsttktsgpraapevyafatpewpgsrdkrtlaeliq
nfrnpedisvqwlhnevqlpdarhsttqprktkgsgffvfsrlevtraeweqkdefieraVhcaaspsqtvqravsvflpgkadp
s
IFhIgGwtBcl5
gtt gtt tga tca gga gcc caa atc ttg tga caa aac tca cac atg ccc acc gtg ccc agc
acc (63 mer)
hIgGWT3xba
gtt gtt tct aga tca ttt acc cgg aga cag gga gag gct ctt ctg cgt gta g
Hu1gGMHwC (sense, 5′ primer for mutating wild type hinge ccc to
mutant sss
gtt gtt gat cag gag ccc aaa tct tct gac aaa act cac aca tct cca ccg tcc cca gca
cct gaa etc ctg ggt gga ccg tca gtc tic c
NT
1D8 vH
caggtgcagctgaaggaggcaggacctggcctggtgcaaccgacacagaccctgtccctcacatgcactg
tctctgggttctcattaaccagcgatggtgtacactggattcgacagcctccaggaaagggtctggaatggatgggaataatatattat
gatggaggcacagattataattcagcaattaaatccagactgagcatcagcagggacacctccaagagccaagttttcttaaaaatc
aacagtctgcaaactgatgacacagccatgtattactgtgccagaatccactttgattactggggccaaggagtcatggtcacagtct
cctct
AA
1D8 VH (no leader)
qvqlkcagpglvqptqtlsltctvsgfsltsdgVhwirqppgkglewmgttyydggtdynsaiksrlsisr
dtsksqvflkinslqtddtamyycarihfdywgqgvmvtvss
NT
1Ds VL (no leader)
gacattgtgctcactcagtctccaacaaccatagctgcatctccaggggagaaggtcaccatcacctgccgt
gccagctccagtgtaagttacatgtactggtaccagcagaagtcaggcgcctcccctaaactctggatttatgacacatccaagctg
gcttctggagttccaaatcgcttcagtggcagtgggtctgggacctcttattctctcgcaatcaacaccatggagactgaagatgctg
ccacttattactgtcagcagtggagtagtactccgctcacgttcgggtctgggaccaagctggagatcaaacgg
AA
1D8 VL
divltqspttiaaspgekvtitcrasssvsymywyqqksgaspklwiydtsklasgvpnrfsgsgsgtsys
laintmetedaatyycqqwsstpltfgsgtkleikr
NT
1D8 scFv
aagcttatggattttcaagtgcagattttcagcttcctgctaatcagtgcttcagtcataatgtccagaggagtcg
acattgtgctcactcagtctccaacaaccatagctgcatctccaggggagaaggtcaccatcacctgccgtgccagctccagtgtaa
gttacatgtactggtaccagcagaagtcaggcgcctcccctaaactctggatttatgacacatccaagctggcttctggagttccaaa
tcgcttcagtggcagtgggtctgggacctcttattctctcgcaatcaacaccatggagactgaagatgctgccacttattactgtcagc
agtggagtagtactccgctcacgttcgggtctgggaccaagctggagatcaaacggggtggcggtggctcgggcggtggtgggt
cgggtggcggcggatctcaggtgcagctgaaggaggcaggacctggcctggtgcaaccgacacagaccctgtccctcacatgc
actgtctctgggttctcattaaccagcgatggtgtacactggattcgacagcctccaggaaagggtctggaatggatgggaataatat
attatgatggaggcacagattataattcagcaattaaatccagactgagcatcagcagggacacctccaagagccaagttttcttaaa
aatcaacagtctgcaaactgatgacacagccatgtattactgtgccagaatccactttgattactggggccaaggagtcatggtcaca
gtctcctctgatca
AA
1D8 scFv
mdfqvqifsfllisasvimsrgvdivltqspttiaaspgekvtitcrasssvsymywyqqksgaspklwiy
dtsklasgvpnrfsgsgsgtsyslaintmetedaatyycqqwsstpltfgsgtkleikrggggsggggsggggsqvqlkcagpg
lvqptqtlsltctvsgfsltsdgvhwirqppgkglewmgttyydggtdynsaiksrlsisrdtsksqvflkinslqtddtamyyca
rihfdywgqgvmvtvss
NT
1D8 scFv IgG WTH WTCH2CH3
aagcttatggattttcaagtgcagattttcagcttcctgctaatcagtgcttcagtcataatgtccagaggagtcg
acattgtgctcactcagtctccaacaaccatagctgcatctccaggggagaaggtcaccatcacctgccgtgccagctccagtgtaa
gttacatgtactggtaccagcagaagtcaggcgcctcccctaaactctggatttatgacacatccaagctggcttctggagttccaaa
tcgcttcagtggcagtgggtctgggacctcttattctctcgcaatcaacaccatggagactgaagatgctgccacttattactgtcagc
agtggagtagtactccgctcacgttcgggtctgggaccaagctggagatcaaacggggtggcggtggctcgggcggtggtgggt
cgggtggcggcggatctcaggtgcagctgaaggaggcaggacctggcctggtgcaaccgacacagaccctgtccctcacatgc
actgtctctgggttctcattaaccagcgatggtgtacactggattcgacagcctccaggaaagggtctggaatggatgggaataatat
attatgatggaggcacagattataattcagcaattaaatccagactgagcatcagcagggacacctccaagagccaagttttcttaaa
aatcaacagtctgcaaactgatgacacagccatgtattactgtgccagaatccactttgattactggggccaaggagtcatggtcaca
gtctcctctgatcaggagcccaaatcttgtgacaaaactcacacatgcccaccgtgcccagcacctgaactcctggggggaccgtc
agtcttcctcttccccccaaaacccaaggacaccctcatgatctcccggacccctgaggtcacatgcgtggtggtggacgtgagcc
acgaagaccctgaggtcaagttcaactggtacgtggacggcgtggaggtgcataatgccaagacaaagccgcgggaggagcag
tacaacagcacgtaccgtgtggtcagcgtcctcaccgtcctgcaccaggactggctgaatggcaaggagtacaagtgcaaggtct
ccaacaaagccctcccagcccccatcgagaaaacaatctccaaagccaaagggcagccccgagaaccacaggtgtacaccctg
cccccatcccgggatgagctgaccaagaaccaggtcagcctgacctgcctggtcaaaggcttctatcccagcgacatcgccgtgg
agtgggagagcaatgggcagccggagaacaactacaagaccacgcctcccgtgctggactccgacggctccttcttcctctacag
caagctcaccgtggacaagagcaggtggcagcaggggaacgtcttctcatgctccgtgatgcatgaggctctgcacaaccactac
acgcagaagagcctctccctgtctccgggtaaatgatctaga
AA
1D8 scFv IgG WTH WTCH2CH3
mdfqvqifsfllisasvimsrgvdivltqspttiaaspgekvtitcrasssvsymywyqqksgaspklwiy
dtsklasgvpnrfsgsgsgtsyslaintmetedaatyycqqwsstpltfgsgtkleikrggggsggggsggggsqvqlkcagpg
lvqptqtlsltctvsgfsltsdgVhwirqppgkglewmgttyydggtdynsaiksrlsisrdtsksqvflkinslqtddtamyyca
rihfdywgqgvmvtvssdqepkscdkthtcppcpapellggpsvflfppkpkdtlmisrtpevtcvvvdvshedpevkthw
yvdgvevhnaktkpreeqynstyrvvsvltvlhqdwlngkeykckvsnkalpapiektiskakgqjprepqvytlppsrdeltk
nqvsltclvkgfypsdiavewesngqpennykttppvldsdgsfflyskltvdksrwqqgnvfscsvmhealhnhytqkslsl
spgk
NT
1D8 scFv IgG MTH MTCH2CH3-CD80
aagcttatggattttcaagtgcagattttcagcttcctgctaatcagtgcttcagtcataatgtccagaggagtcg
acattgtgctcactcagtctccaacaaccatagctgcatctccaggggagaaggtcaccatcacctgccgtgccagctccagtgtaa
gttacatgtactggtaccagcagaagtcaggcgcctcccctaaactctggatttatgacacatccaagctggcttctggagttccaaa
tcgcttcagtggcagtgggtctgggacctcttattctctcgcaatcaacaccatggagactgaagatgctgccacttattactgtcagc
agtggagtagtactccgctcacgttcgggtctgggaccaagctggagatcaaacggggtggcggtggctcgggcggtggtgggt
cgggtggcggcggatctcaggtgcagctgaaggaggcaggacctggcctggtgcaaccgacacagaccctgtccctcacatgc
actgtctctgggttctcattaaccagcgatggtgtacactggattcgacagcctccaggaaagggtctggaatggatgggaataatat
attatgatggaggcacagattataattcagcaattaaatccagactgagcatcagcagggacacctccaagagccaagttttcttaaa
aatcaacagtctgcaaactgatgacacagccatgtattactgtgccagaatccactttgattactggggccaaggagtcatggtcaca
gtctcctctgatctggagcccaaatcttctgacaaaactcacacaagcccaccgagcccagcacctgaactcctggggggatcgtc
agtcttcctcttccccccaaaacccaaggacaccctcatgatctcccggacccctgaggtcacatgcgtggtggtggacgtgagcc
acgaagaccctgaggtcaagttcaactggtacgtggacggcgtggaggtgcataatgccaagacaaagccgcgggaggagcag
tacaacagcacgtaccgtgtggtcagcgtcctcaccgtcctgcaccaggactggctgaatggcaaggagtacaagtgcaaggtct
ccaacaaagccctcccagcccccatcgagaaaaccatctccaaagccaaagggcagccccgagaaccacaggtgtacaccctg
cccccatcccgggatgagctgaccaagaaccaggtcagcctgacctgcctggtcaaaggcttctatcccagcgacatcgccgtgg
agtgggagagcaatgggcagccggagaacaactacaagaccacgcctcccgtgctggactccgacggctccttcttcctctacag
caagctcaccgtggacaagagcaggtggcagcaggggaacgtcttctcatgctccgtgatgcatgaggctctgcacaaccactac
acgcagaagagcctctccctgtctccgggtaaagcggatccttcgaacctgctcccatcctgggccattaccttaatctcagtaaatg
gaatttttgtgatatgctgcctgacctactgctttgccccaagatgcagagagagaaggaggaatgagagattgagaagggaaagt
gtacgccctgtataaatcgata
AA
1D8 scFv IgG MTH MTCH2CH3-CD80
mdfqvqifsfllisasvimsrgvdivltqspttiaaspgekvtitcrasssvsymywyqqksgaspklwiy
dtsklasgvpnrfsgsgsgtsyslaintmetedaatyycqqwsstpltfgsgtkleikrggggsggggsggggsqvqlkcagpg
lvqptqtlsltctvsgfsltsdgVhwirqppgkglewmgttyydggtdyflsaiksrlsisrdtsksqvflkiflslqtddtamyyca
rihfdywgqgvmvtvssdlepkssdkthtsppspapellggssvflfbpkpkdtlmisrtpevtcvvvdvshedpevkfhwy
vdgveVhnaktkpreeqynstyrvvsvltvlhqdwlngkeykckvsnkalpapiektiskakgqprepqvytlppsrdeltkfl
qvsltclvkgfypsdiavewesngqpennykttppvldsdgsfflyskltvdksrwqqgflvfscsvmhealhflhytqkslsls
pgkadpsnllpswaitlisvngifviccltycfaprcrerrrnerlrresvrpv
NT
1D8 scFv IgG WTH WTCH2CH3-CD80
aagcttatggattttcaagtgcagattttcagcttcctgctaatcagtgcttcagtcataatgtccagaggagtcg
acattgtgctcactcagtctccaacaaccatagctgcatctccaggggagaaggtcaccatcacctgccgtgccagctccagtgtaa
gttacatgtactggtaccagcagaagtcaggcgcctcccctaaactctggatttatgacacatccaagctggcttctggagttccaaa
tcgcttcagtggcagtgggtctgggacctcttattctctcgcaatcaacaccatggagactgaagatgctgccacttattactgtcagc
agtggagtagtactccgctcacgttcgggtctgggaccaagctggagatcaaacggggtggcggtggctcgggcggtggtgggt
cgggtggcggcggatctcaggtgcagctgaaggaggcaggacctggcctggtgcaaccgacacagaccctgtccctcacatgc
actgtctctgggttctcattaaccagcgatggtgtacactggattcgacagcctccaggaaagggtctggaatggatgggaataatat
attatgatggaggcacagattataattcagcaattaaatccagactgagcatcagcagggacacctccaagagccaagttttcttaaa
aatcaacagtctgcaaactgatgacacagccatgtattactgtgccagaatccactttgattactggggccaaggagtcatggtcaca
gtctcctctgatctggagcccaaatcttgtgacaaaactcacacatgcccaccgtgcccagcacctgaactcctggggggaccgtc
agtcttcctcttccccccaaaacccaaggacaccctcatgatctcccggacccctgaggtcacatgcgtggtggtggactgagcc
acgaagaccctgaggtcaagttcaactggtacgtggacggcgtggaggtgcataatgccaagacaaagccgcgggaggagcag
tacaacagcacgtaccgtgtggtcagcgtcctcaccgtcctgcaccaggactggctgaatggcaaggagtacaagtgcaaggtct
ccaacaaagccctcccagcccccatcgagaaaaccatctccaaagccaaagggcagccccgagaaccacaggtgtacaccctg
cccccatcccgggatgagctgaccaagaaccaggtcagcctgacctgcctggtcaaaggcttctatcccagcgacatcgccgtgg
agtgggagagcaatgggcagccggagaacaactacaagaccacgcctcccgtgctggactccgacggctccttcttcctctacag
caagctcaccgtggacaagagcaggtggcagcaggggaacgtcttctcatgctccgtgatgcatgaggctctgcacaaccactac
acgcagaagagcctctccctgtctccgggtaaagcggatccttcgaacctgctcccatcctgggccattaccttaatctcagtaaatg
gaatttttgtgatatgctgcctgacctactgctttgccccaagatgcagagagagaaggaggaatgagagattgagaagggaaagt
gtacgccctgtataaatcgata
AA
1D8 scFv IgG WTH WTCH2CH3-CD80
mdfqvqifsfllisasvimsrgvdivltqspttiaaspgekvtitcrasssvsymywyqqksgaspklwiy
dtsklasgvpnrfsgsgsgtsyslaintmetedaatyycqqwsstpltfgsgtkleiklggggsggggsggggsqvqlkcagpg
lvqptqtlsltctvsgfsltsdgvhwirqppgkglewmgiiyydggtdyflsaiksrlsisrdtsksqvflkinslqtddtamyyca
rihfdywgqgvmvtvssdlepkscdkthtcppcpapellggpsvflfppkpkdtlmisrtpevtcvvdvshedpevkfnw
yvdgvevhnaktkpreeqynstyrvvsvltvlhqdwlngkeykckvsnkalpapiektiskakgqprepqvytlppsrdeltk
nqvsltclvkgfypsdiavewesngqpennykttppvldsdgsfflyskltvdksrwqqgflvfscsvmhealhnhytqkslsl
spgkadpsnllpswaitlisvngifviccltycfaprcrerrrnerlrresvrpv
NT
Anti human CD3 scFv WTH WTCH2CH3
aagcttatggattttcaagtgcagattttcagcttcctgctaatcagtgcttcagtcataatgtccagaggagtcg
acatccagatgacacagactacatcctccctgtctgcctctctgggagacagagtcaccatcagttgcagggcaagtcaggacattc
gcaattatttaaactggtatcagcagaaaccagatggaactgttaaactcctgatctactacacatcaagattacactcaggagtccca
tcaaggttcagtggcagtgggtctggaacagattattctctcaccattgccaacctgcaaccagaagatattgccacttacttttgcca
acagggtaatacgcttccgtggacgttcggtggaggcaccaaactggtaaccaaacgggagctcggtggcggtggctcgggcg
gtggtgggtcgggtggcggcggatctatcgatgaggtccagctgcaacagtctggacctgaactggtgaagcctggagcttcaat
gtcctgcaaggcctctggttactcattcactggctacatcgtgaactggctgaagcagagccatggaaagaaccttgagtggattgg
acttattaatccatacaaaggtcttactacctacaaccagaaattcaagggcaaggccacattaactgtagacaagtcatccagcaca
gcctacatggagctcctcagtctgacatctgaagactctgcagtctattactgtgcaagatctgggtactatggtgactcggactggta
cttcgatgtctggggcgcagggaccacggtcaccgtctcctctgatcaggagcccaaatcttgtgacaaaactcacacatgcccac
cgtgcccagcacctgaactcctggggggaccgtcagtcttcctcttccccccaaaacccaaggacaccctcatgatctcccggacc
cctgaggtcacatgcgtggtggtggacgtgagccacgaagaccctgaggtcaagttcaactggtacgtggacggcgtggaggtg
cataatgccaagacaaagccgcgggaggagcagtacaacagcacgtaccgtgtggtcagcgtcctcaccgtcctgcaccagga
ctggctgaatggcaaggagtacaagtgcaaggtctccaacaaagccctcccagcccccatcgagaaaacaatctccaaagccaa
agggcagccccgagaaccacaggtgtacaccctgcccccatcccgggatgagctgaccaagaaccaggtcagcctgacctgcc
tggtcaaaggcttctatcccagcgacatcgccgtggagtgggagagcaatgggcagccggagaacaactacaagaccacgcctc
ccgtgctggactccgacggctccttcttcctctacagcaagctcaccgtggacaagagcaggtggcagcaggggaacgtcttctca
tgctccgtgatgcatgaggctctgcacaaccactacacgcagaagagcctctccctgtctccgggtaaatgatctaga
AA
Anti human CD3 scFv WTH WTCH2CH3
Mdfqvqifsfllisasvimsrgvdiqmtqttsslsaslgdrvtiscrasqdirnlylnwyqqkpdgtvklliy
ytsrlhsgvpsrfsgsgsgtdysltianlqpediatyfcqqgntlpwtfgggtklvtkrelggggsggggsggggsidevqlqqsg
pelvkpgasmsckasgysftgyivnwlkqshgknlewigliflpykglttyflqkflgkatltvdkssstaymellsltsedsavy
ycarsgyygdsdwyfdvwgagttvtvssdqepkscdkthtcppcpapellggpsvflfppkpkdthmsrtpevtcvvvdvs
hedpevkmwyvdgvevhnaktkpreeqynstyrvvsvltvlhqdwlflgkeykckvsflkalpapiektiskakgqprepq
vytlppsrdeltknqvsltclvkgfypsdiavewesflgqpeflflykttppvldsdgsfflyskltvdkslwqqgnvfscsvmhe
alhnhytqkslslspgk
NT
2H7-antiCD40 scFv MTH (SSS) MTCH2WTCH3
2h7-40.2.2201g+restriction sites
aagcttgccgccatggattttcaagtgcagattttcagcttcctgctaatcagtgcttcagtcataattgccagag
gacaaattgttctctcccagtctccagcaatcctgtctgcatctccaggggagaaggtcacaatgacttgcagggccagctcaagtg
taagttacatgcactggtaccagcagaagccaggatcctcccccaaaccctggatttatgccccatccaacctggcttctggagtcc
ctgctcgcttcagtggcagtgggtctgggacctcttactctctcacaatcagcagagtggaggctgaagatgctgccacttattactg
ccagcagtggagttttaacccacccacgttcggtgctgggaccaagctggagctgaaaggtggcggtggctcgggcggtggtgg
atctggaggaggtgggagctctcaggcttatctacagcagtctggggctgagctggtgaggcctggggcctcagtgaagatgtcct
gcaaggcttctggctacacatttaccagttacaatatgcactgggtaaagcagacacctagacagggcctggaatggattggagct
atttatccaggaaatggtgatacttcctacaatcagaagttcaagggcaaggccacactgactgtagacaaatcctccagcacagcc
tacatgcagctcagcagcctgacatctgaagactctgcggtctatttctgtgcaagagtggtgtactatagtaactcttactggtacttc
gatgtctggggcacagggaccacggtcaccgtctcttctgatcaatccaactctgaagaagcaaagaaagaggaggccaaaaag
gaggaagccaagaaatctaacagcgtcgacattgttctgactcagtctccagccaccctgtctgtgactccaggagatagagtctct
ctttcctgcagggccagccagagtattagcgactacttacactggtatcaacaaaaatcacatgagtctccaaggcttctcatcaaata
tgcttcccattccatctctgggatcccctccaggttcagtggcagtggatcagggtcagatttcactctcagtatcaacagtgtggaac
ctgaagatgttggaatttattactgtcaacatggtcacagctttccgtggacgttcggtggaggcaccaagctggaaatcaaacggg
gtggcggtggctcgggcggaggtgggtcgggtggcggcggatctcagatccagttggtgcaatctggacctgagctgaagaag
cctggagagacagtcaggatctcctgcaaggcttctgggtatgccttcacaactactggaatgcagtgggtgcaagagatgccagg
aaagggtttgaagtggattggctggataaacaccccactctggagtgccaaaatatgtagaagacttcaaggacggtttgccttctct
ttggaaacctctgccaacactgcatatttacagataagcaacctcaaagatgaggacacggctacgtatttctgtgagatccggga
atggtaactatgacctggcetactttgcttactggggccaagggacactggtcactgtctctgatcaggagcccaaatcttctgacaa
aactcacacatccccaccgtccccagcacctgaactcctggggggatcgtcagtcttcctcttccccccaaaacccaaggacaccc
tcatgatctcccggacccctgaggtcacatgcgtggtggtggacgtgagccacgaagaccctgaggtcaagttcaactggtacgtg
gacggcgtggaggtgcataatgccaagacaaagccgcgggaggagcagtacaacagcacgtaccgtgtggtcagcgtcctcac
cgtcctgcaccaggactggctgaatggcaaggagtacaagtgcaaggtctccaacaaagccctcccagcccccatcgagaaaac
aatctccaaagccaaagggcagccccgagaaccacaggtgtacaccctgcccccatcccgggatgagctgaccaagaaccagg
tcagcctgacctgcctggtcaaaggcttctatcccagcgacatcgccgtggagtgggagagcaatgggcagccggagaacaact
acaagaccacgcctcccgtgctggactccgacggctccttcttcctctacagcaagctcaccgtggacaagagcaggtggcagca
ggggaacgtcttctcatgctccgtgatgcatgaggctctgcacaaccactacacgcagaagagcctctccctgtctccgggtaaatg
atctaga
AA
2H7-antiCD40 seFv MTII (SSS) MTCH2WTCH3
2H7-40.2.2201g
mdfqvqifsfllisasviiargqivlsqspailsaspgekvtmtcrasssvsymhwyqqkpgsspkpwiy
apsnlasgvparfsgsgsgtsysltisrveaedaatyycqqwsfnpptfgagtklelkggggsggggsggggssqaylqqsgac
lvrpgasvkmsckasgytftsynmhwvkqtprqglewigaiypgflgdtsyflqkfkgkatltvdkssstaymqlssltsedsa
vyfearvvyysnsywyfdvwgtgttvtvssdqsnseeakkeeakkeeakksflsvdivltqspatlsvtpgdlwslscrasqsis
dylhwyqqkshesprllikyashsisgipsrfsgsgsgsdftlsiflsvepedvgiyyeqhghsfpwtfgggtkleikrggggsg
gggsggggsqiqlvqsgpelkkpgctvtisckasgyaftttgmqwvqempgkglkwigwifltplwsakicrrlqgrfafslet
santayiqisnlkdedtatyfcvrsgngnydlayfaywgqgtlvtvsdqepkssdkthtsppspapellggssvflfppkpkdtl
misrtpevtcvvvdvshedpevkthwyvdgvevhflaktkpreeqyflstyrvvsvltvlhqdwlngkeykekvsnkalpap
iektiskakgqprepqvytlppsrdeltknqvsltclvkgfypsdiavewesflgqpeflflykttppvldsdgsfflyskltvdksr
wqqgnvfscsvmhealhnhytqkslslspgk
NT
5B9 VH (includes the VH leader peptide)
atggctgtcttggggctgctcttctgcctggtgacatttccaagctgtgtcctatcccaggtgcagctgaagca
gtcaggacctggcctagtgcagtcctcacagagcctgtccatcacctgcacagtctctggtttctcattaactacctatgctgtacact
gggttcgccagtctccaggaaagggtctggagtggctgggagtgatatggagtggtggaatcacagactataatgcagctttcatat
ccagactgagcatcaccaaggacgattccaagagccaagttttctttaaaatgaacagtctgcaacctaatgacacagccatttatta
ctgtgccagaaatgggggtgataactacccttattactatgctatggactactggggtcaaggaacctcagtcaccgtctcctca
5B9 VH missing the leader:
caggtgcagctgaagcagtcaggacctggcctagtgcagtcctcacagagcctgtccatcacctgcacagt
ctctggtttctcattaactacctatgctgtacactgggttcgccagtctccaggaaagggtctggagtggctgggagtgatatggagt
ggtggaatcacagactataatgcagctttcatatccagactgagcatcaccaaggacgattccaagagccaagttttctttaaaatga
acagtctgcaacctaatgacacagccatttattactgtgccagaaatgggggtgataactacccttattactatgctatggactactgg
ggtcaaggaacctcagtcaccgtctcctca
AA
5B9 VH (includes leader peptide)
MAVLGLLFCLVTFPSCVLSQVQLKQSGPGLVQSSQSLSITCTVSGFSL
TTYAVHWVRQSPGKGLEWLGVIWSGGITDYNAAFJSRLSITKDDSKSQVFFKMNS
LQPNDTAIYYCARNGGDNYPYYYAMDYWGQGTSVTVSS
5B9 VH no leader Peptide
QVQLKQSGPGLVQSSQSLSITCTVSGFSLTTYAVHWVRQSPGKGLE
WLGVIWSGGITDYNAAFISRLSLTKDDSKSQVFFKMNSLQPNDTAIYYCARNGGDN
YPYYYAMDYWGQGTSVTVSS
NT
5B9 VL
atgaggttctctgctcagcttctggggctgcttgtgctctggatccctggatccactgcagatattgtgatgacg
caggctgcattctccaatccagtcactcttggaacatcagcttccatctcctgcaggtctagtaagagtctcctacatagtaatggcatc
acttatttgtattggtatctgcagaagccaggccagtctcctcagctcctgatttatcagatgtccaaccttgcctcaggagtcccagac
aggttcagtagcagtgggtcaggaactgatttcacactgagaatcagcagagtggaggctgaggatgtgggtgtttattact~gct
caaaatctagaacttccgctcacgttcggtgctgggaccaagctggagctgaaacgg
AA
5B9 VL
MRFSAQLLGLLVLWIPGSTADIVMTQAAFSNPVTLGTSASISCRSSKS
LLHSNGITYLYWYLQKPGQSPQLLIYQMSNLASGVPDRFSSSGSGTDFTLRISRVEA
EDVGVYYCAQNLELPLTFGAGTKLELKR
NT
5B9 scFV
aagcttgccgccatgaggttctctgctcagcttctggggctgcttgtgctctggatccctggatccactgcaga
tattgtgatgacgcaggctgcattctccaatccagtcactcttggaacatcagcttccatctcctgcaggtctagtaagagtctcctaca
tagtaatggcatcacttatttgtattggtatctgcagaagccaggccagtctcctcagctcctgatttatcagatgtccaaccttgcctca
ggagtcccagacaggttcagtagcagtgggtcaggaactgatttcacactgagaatcagcagagtggaggctgaggatgtgggtg
tttattactgtgctcaaaatctagaacttccgctcacgttcggtgctgggaccaagctggagctgaaacggggtggcggtggctcgg
gcggtggtgggtcgggtggcggcggatcgtcacaggtgcagctgaagcagtcaggacctggcctagtgcagtcctcacagagc
ctgtccatcacctgcacagtctctggtttctcattaactacctatgctgtacactgggttcgccagtctccaggaaagggtctggagtg
gctgggagtgatatggagtggtggaatcacagactataatgcagctttcatatccagactgagcatcaccaaggacgattccaaga
gccaagttttctttaaaatgaacagtctgcaacctaatgacacagccatttattactgtgccagaaatgggggtgataactacccttatt
actatgctatggactactggggtcaaggaacctcagtcaccgtctcctct
AA
5B9 scFV
MRFSAQLLGLLVLWIPGSTADIVMTQAAFSNPVTLGTSASISCRSSKS
LLHSNGITYLYWYLQKPGQSPQLLIYQMSNLASGVPDRFSSSGSGTDFTLRISRVEA
EDVGVYYCAQNLELPLTFGAGTKLELKRGGGGSGGGGSGGGGSSQVQLKQSGPG
LVQSSQSLSITCTVSGFSLTTYAVHWVRQSPGKGLEWLGVIWSGGITDYNAAFJSR
LSITKDDSKSQVFFKMNSLQPNDTAIYYCARNGGDNYPYYYAMDYWGQGTSVTV
SS
NT
5B9 scFV-hmtIgG1-hCD80
aagcttgccgccatgaggttctctgctcagcttctggggctgcttgtgctctggatccctggatccactgcaga
tattgtgatgacgcaggctgcattctccaatccagtcactcttggaacatcagcttccatctcctgcaggtctagtaagagtctcctaca
tagtaatggcatcacttatttgtattggtatctgcagaagccaggccagtctcctcagctcctgatttatcagatgtccaaccttgcctca
ggagtcccagacaggttcagtagcagtgggtcaggaactgatttcacactgagaatcagcagagtggaggctgaggatgtgggtg
tttattactgtgctcaaaatctagaacttccgctcacgttcggtgctgggaccaagctggagctgaaacggggtggcggtggctcgg
gcggtggtgggtcgggtggcggcggatcgtcacaggtgcagctgaagcagtcaggacctggcctagtgcagtcctcacagagc
ctgtccatcacctgcacagtctctggtttctcattaactacctatgctgtacactgggttcgccagtctccaggaaagggtctggagtg
gctgggagtgatatggagtggtggaatcacagactataatgcagctttcatatccagactgagcatcaccaaggacgattccaaga
gccaagttttctttaaaatgaacagtctgcaacctaatgacacagccatttattactgtgccagaaatgggggtgataactacccttatt
actatgctatggactactggggtcaaggaacctcagtcaccgtctcctctgatctggagcccaaatcttctgacaaaactcacacaag
cccaccgagcccagcacctgaactcctggggggatcgtcagtcttcctcttccccccaaaacccaaggacaccctcatgatctccc
ggacccctgaggtcacatgcgtggtggtggacgtgagccacgaagaccctgaggtcaagttcaactggtacgtggacggcgtgg
aggtgcataatgccaagacaaagccgcgggaggagcagtacaacagcacgtaccgtgtggtcagcgtcctcaccgtcctgcacc
aggactggctgaatggcaaggagtacaagtgcaaggtctccaacaaagccctcccagcccccatcgagaaaaccatctccaaag
ccaaagggcagccccgagaaccacaggtgtacaccctgcccccatcccgggatgagctgaccaagaaccaggtcagcctgacc
tgcctggtcaaaggcttctatcccagcgacatcgccgtggagtgggagagcaatgggcagccggagaacaactacaagaccac
gcctcccgtgctggactccgacggctccttcttcctctacagcaagctcaccgtggacaagagcaggtggcagcaggggaacgtc
ttctcatgctccgtgatgcatgaggctctgcacaaccactacacgcagaagagcctctccctgtctccgggtaaagcggatccttcg
aacctgctcccatcctgggccattaccttaatctcagtaaatggaatttttgtgatatgctgcctgacctactgctttgccccaagatgca
gagagagaaggaggaatgagagattgagaagggaaagtgtacgccctgtataaatcgatactcgag
AA
5B9 scFV-hmtIgG1-hCD80
MRFSAQLLGLLVLWIPGSTADIVMTQAAFSNPVTLGTSASISCRSSKS
LLHSNGITYLYWYLQKPGQSPQLLIYQMSNLASGVPDRFSSSGSGTDFTLRISRVEA
EDVGVYYCAQNLELPLTFGAGTKLELKRGGGGSGGGGSGGGGSSQVQLKQSGPG
LVQSSQSLSITCTVSGFSLTTYAVHWVRQSPGKGLEWLGVIWSGGITDYNAAFISR
LSITIKDDSKSQVFFKMNSLQPNDTALYYCARNGGDNYPYYYAMDYWGQGTSVTV
SSDLEPKSSDKTHTSPPSPAPELLGGSSVFLFPPKPKDTLMISRTPEVTCVVVDVSHE
DPEVKFNWYVDGVEVHNAKTKPREEQYNSTYRVVSVLTVLHQDWLNGKEYKCK
VSNKALPAPIEKTISKAKGQPREPQVYTLPPSRDELTKNQVSLTCLVKGFYPSDIAV
EWESNGQPENNYKTTPPVLDSDGSFFLYSKLTVDKSRWQQGNVFSCSVMHEALH
NHYTQKSLSLSPGKADPSNLLPSWAITLISVNGIFVICCLTYCFAPRCRERRRNERLR
RESVRPV
NT
2e12 scFV WTH CH2 CH3 (2e12 scFV-WthIgG-CD80)
aagcttatggattttcaagtgcagattttcagcttcctgctaatcagtgcttcagtcataatgtccagaggagtcg
acattgtgctcacccaatctccagcttctttggctgtgtctctaggtcagagagccaccatctcctgcagagccagtgaaagtgttgaa
tattatgtcacaagtttaatgcagtggtaccaacagaaaccaggacagccacccaaactcctcatctctgctgcatccaacgtagaat
ctggggtccctgccaggtttagtggcagtgggtctgggacagacttcagcctcaacatccatcctgtggaggaggatgatattgcaa
tgtatttctgtcagcaaagtaggaaggttccttggacgttcggtggaggcaccaagctggaaatcaaacggggtggcggtggctcg
ggcggaggtgggtcgggtggcggcggatctcaggtgcagctgaaggagtcaggacctggcctggtggcgccctcacagagcc
tgtccatcacatgcaccgtctcagggttctcattaaccggctatggtgtaaactgggttcgccagcctccaggaaagggtctggagt
ggctgggaatgatatggggtgatggaagcacagactataattcagctctcaaatccagactgagcatcaccaaggacaactccaa
gagccaagttttcttaaaaatgaacagtctgcaaactgatgacacagccagatactactgtgccagagatggttatagtaactttcatt
actatgttatggactactggggtcaaggaacctcagtcaccgtctcctcagatctggagcccaaatcttgtgacaaaactcacacatg
cccaccgtgcccagcacctgaactcctggggggaccgtcagtcttcctcttccccccaaaacccaaggacaccctcatgatctccc
ggacccctgaggtcacatgcgtggtggtggacgtgagccacgaagaccctgaggtcaagttcaactggtacgtggacggcgtgg
aggtgcataatgccaagacaaagccgcgggaggagcagtacaacagcacgtaccgtgtggtcagcgtcctcaccgtcctgcacc
aggactggctgaatggcaaggagtacaagtgcaaggtctccaacaaagccctcccagcccccatcgagaaaaccatctccaaag
ccaaagggcagccccgagaaccacaggtgtacaccctgcccccatcccgggatgagctgaccaagaaccaggtcagcctgacc
tgcctggtcaaaggcttctatcccagcgacatcgccgtggagtgggagagcaatgggcagccggagaacaactacaagaccac
gcctcccgtgctggactccgacggctccttcttcctctacagcaagctcaccgtggacaagagcaggtggcagcaggggaacgtc
ttctcatgctccgtgatgcatgaggctctgcacaaccactacacgcagaagagcctctccctgtctccgggtaaagcggatccttcg
aacctgctcccatcctgggccattaccttaatctcagtaaatggaatttttgtgatatgctgcctgacctactgctttgccccaagatgca
gagagagaaggaggaatgagagattgagaagggaaagtgtacgccctgtataaatcgat
2e12 scFV WTH CH2 CH3 2e12 scFV-WthIgG-CD80
mdfqvqifsfllisasvimsrgvdivltqspaslavslgqratiscrasesveyyvtslmqwyqqkpgqp
pkllisaasnvesgvparfsgsgsgtdfslnihpveeddiamyfcqqsrkvpwtfgggtkleikrggggsggggsggggsqvq
lkesgpglvapsqslsitctvsgfsltgygvnwvrqppgkglewlgmiwgdgstdynsalksrlsitkdnsksqvflkmnslqt
ddtaryycardgysnthyyvmdywgqgtsvtvssdlepkscdkthtcppcpapellggpsvflfppkpkdtlmisrtpevtc
vvvdvshedpevkfnwyvdgvevhnaktkpreeqynstyrvvsvltvlhqdwlngkeykckvsflkalpapiektiskakg
qprepqvytlppsrdeltknqvsltclvkgfypsdiavewesngqpennykttppvldsdgsfflyskltvdksrwqqgflvfsc
svmhealhnhytqkslslspgkadpsnllpswaitlisvngifviccltycfaprcrerrrnerlrresvrpv
NT
2H7-human IgE Fe (CH2—CH3-CH4)
aagcttgccgccatggattttcaagtgcagattttcagcttcctgctaatcagtgcttcagtcataattgccagag
gacaaattgttctctcccagtctccagcaatcctgtctgcatctccaggggagaaggtcacaatgacttgcagggccagctcaagtg
taagttacatgcactggtaccagcagaagccaggatcctcccccaaaccctggatttatgccccatccaacctggcttctggagtcc
ctgctcgcttcagtggcagtgggtctgggacctcttactctctcacaatcagcagagtggaggctgaagatgctgccacttattactg
ccagcagtggagttttaacccacccacgttcggtgctgggaccaagctggagctgaaaggtggcggtggctcgggcggtggtgg
atctggaggaggtgggagctctcaggcttatctacagcagtctggggctgagctggtgaggcctggggcctcagtgaagatgtcct
gcaaggcttctggctacacatttaccagttacaatatgcactgggtaaagcagacacctagacagggcctggaatggattggagct
atttatccaggaaatggtgatacttcctacaatcagaagttcaagggcaaggccacactgactgtagacaaatcctccagcacagcc
tacatgcagctcagcagcctgacatctgaagactctgcggtctatttctgtgcaagagtggtgtactatagtaactcttactggtacttc
gatgtctggggcacagggaccacggtcaccgtctctgatcacgtctgctccagggacttcaccccgcccaccgtgaagatcttaca
gtcgtcctgcgacggcggcgggcacttccccccgaccatccagctcctgtgcctcgtctctgggtacaccccagggactatcaac
atcacctggctggaggacgggcaggtcatggacgtggacttgtccaccgcctctaccacgcaggagggtgagctggcctccaca
caaagcgagctcaccctcagccagaagcactggctgtcagaccgcacctacacctgccaggtcacctatcaaggtcacacctttg
aggacagcaccaagaagtgtgcagattccaacccgagaggggtgagcgcctacctaagccggcccagcccgttcgacctgttca
tccgcaagtcgcccacgatcacctgtctggtggtggacctggcacccagcaaggggaccgtgaacctgacctggtcccgggcca
gtgggaagcctgtgaaccactccaccagaaaggaggagaagcagcgcaatggcacgttaaccgtcacgtccaccctgccggtg
ggcacccgagactggatcgagggggagacctaccagtgcagggtgacccacccccacctgcccagggccctcatgcggtcca
cgaccaagaccagcggcccgcgtgctgccccggaagtctatgcgtttgcgacgccggagtggccggggagccgggacaagcg
caccctcgcctgcctgatccagaacttcatgcctgaggacatctcggtgcagtggctgcacaacgaggtgcagctcccggacgcc
cggcacagcacgacgcagccccgcaagaccaagggctccggcttcttcgtcttcagccgcctggaggtgaccagggccgaatg
ggagcagaaagatgagttcatctgccgtgcagtccatgaggcagcgagcccctcacagaccgtccagcgagcggtgtctgtaaat
cccggtaaatgataatctaga
AA
2H7 scFv IgE (CH3—CH3—CH4)
mdfqvqifsfllisasviiargqivlsqspailsaspgekvtmtcrasssvsymhwyqqkpgsspkpwiy
apsnlasgvparfsgsgsgtsysltisrveaedaatyycqqwsfnpptfgagtklelkggggsggggsggggssqaylqqsgae
lvrpgasvkmsckasgytftsynmhwvkqtprqglewigaiypgngdtsynqktkgkatltvdkssstaymqlssltsedsa
vyfcarvvyysnsywyfdvwgtgttvtvsdhvcsrdfipptvkilqsscdggghfpptiqflclvsgytpgtiniwledgeqvm
dvdlstasttqegelastqseltlsqkhwlsdrtytcqvtyqghtfedstkkcadsnprgvsaylsrpspfdlfirksptitclvvdla
pskgtvnltwsrasgkpvnhstrkeekqrngtltvtstlpvgtrdwiegctyqcrvthphlpralmrsttktsgpraapevyafat
pewpgsrdkrtlacliqnfmpedisvqwlhnevqlpdarhsttqprktkgsgffvfsrlevtraeweqkdeflcravhcaasps
qtvqravsvnpgk
NT
2H7 scFv MH (SSS) MCH2WTCH3
aagcttgccgccatggattttcaagtgcagattttcagcttcctgctaatcagtgcttcagtcataattgccagag
gacaaattgttctctcccagtctccagcaatcctgtctgcatctccaggggagaaggtcacaatgacttgcagggccagctcaagtg
taagttacatgcactggtaccagcagaagccaggatcctcccccaaaccctggatttatgccccatccaacctggcttctggagtcc
ctgctcgcttcagtggcagtgggtctgggacctcttactctctcacaatcagcagagtggaggctgaagatgctgccacttattactg
ccagcagtggagttttaacccacccacgttcggtgctgggaccaagctggagctgaaagatggcggtggctcgggcggtggtgg
atctggaggaggtgggagctctcaggcttatctacagcagtctggggctgagctggtgaggcctggggcctcagtgaagatgtcct
gcaaggcttctggctacacatttaccagttacaatatgcactgggtaaagcagacacctagacagggcctggaatggattggagct
atttatccaggaaatggtgatacttcctacaatcagaagttcaagggcaaggccacactgactgtagacaaatcctccagcacagcc
tacatgcagctcagcagcctgacatctgaagactctgcggtctatttctgtgcaagagtggtgtactatagtaactcttactggtacttc
gatgtctggggcacagggaccacggtcaccgtctcttctgatcaggagcccaaatcttctgacaaaactcacacatccccaccgtc
cccagcacctgaactcctggggggatcgtcagtcttcctcttccccccaaaacccaaggacaccctcatgatctcccggacccctg
aggtcacatgcgtggtggtggacgtgagccacgaagaccctgaggtcaagttcaactggtacgtggacggcgtggaggtgcata
atgccaagacaaagccgcgggaggagcagtacaacagcacgtaccgtgtggtcagcgtcctcaccgtcctgcaccaggactgg
ctgaatggcaaggagtacaagtgcaaggtctccaacaaagccctcccagcccccatcgagaaaacaatctccaaagccaaaggg
cagccccgagaaccacaggtgtacaccctgcccccatcccgggatgagctgaccaagaaccaggtcagcctgacctgcctggtc
aaaggcttctatcccagcgacatcgccgtggagtgggagagcaatgggcagccggagaacaactacaagaccacgcctcccgt
gctggactccgacggctccttcttcctctacagcaagctcaccgtggacaagagcaggtggcagcaggggaacgtcttctcatgct
ccgtgatgcatgaggctctgcacaaccactacacgcagaagagcctctccctgtctccgggtaaatgatctaga
AA
2H7 scFv MH (SSS) MCH2WTCH3
mdfqvqifsfllisasviiargqivlsqspailsaspgekvtmtcrasssvsymhwyqqkpgsspkpwiy
apsnlasgvparfsgsgsgtsysltisrveaedaatyycqqwsfnpptfgagtklelkdgggsggggsggggssqaylqqsgac
lvrpgasvkmsckasgytfisynmhwvkqtprqglewigaiypgngdtsynqktkgkatltvdkssstaymqlssltsedsa
vyfcarvvyysnsywyfdvwgrgttvtvssdqepkssdkthtsppspapellggssvflfppkpkdtlrnisrtpevtcvvvdv
shedpevkfriwyvdgvevhnaktkpreeqynstyrvvsvltvlhqdwlngkeykckvsnkalpapiektiskakgqprep
qvytlppsrdeltknqvsltclvkgfypsdiavewesflgqpeflflykttppvldsdgsfflyskltvdksrwqqgflvfscsvflth
ealhnhytqkslslspgk
NT
5B9 scFv MTHWTCH2CH3
aagcttgccgccatgaggttctctgctcagcttctggggctgcttgtgctctggatccctggatccactgcaga
tattgtgatgacgcaggctgcattctccaatccagtcactcttggaacatcagcttccatctcctgcaggtctagtaagagtctcctaca
tagtaatggcatcacttatttgtattggtatctgcagaagccaggccagtctcctcagctcctgatttatcagatgtccaaccttgcctca
ggagtcccagacaggttcagtagcagtgggtcaggaactgatttcacactgagaatcagcagagtggaggctgaggatgtgggtg
tttattactgtgctcaaaatctagaacttccgctcacgttcggtgctgggaccaagctggagctgaaacggggtggcggtggctcgg
gcggtggtgggtcgggtggcggcggatcgtcacaggtgcagctgaagcagtcaggacctggcctagtgcagtcctcacagagc
ctgtccatcacctgcacagtctctggtttctcattaactacctatgctgtacactgggttcgccagtctccaggaaagggtctggagtg
gctgggagtgatatggagtggtggaatcacagactataatgcagctttcatatccagactgagcatcaccaaggacgattccaaga
gccaagttttctttaaaatgaacagtctgcaacctaatgacacagccatttattactgtgccagaaatgggggtgataactacccttatt
actatgctatggactactggggtcaaggaacctcagtcaccgtctcctctgatcaggagcccaaatcttctgacaaaactcacacatc
cccaccgtccccagcacctgaactcctggggggaccgtcagtcttcctcttccccccaaaacccaaggacaccctcatgatctccc
ggacccctgaggtcacatgcgtggtggtggacgtgagccacgaagaccctgaggtcaagttcaactggtacgtggacggcgtgg
aggtgcataatgccaagacaaagccgcgggaggagcagtacaacagcacgtaccgtgtggtcagcgtcctcaccgtcctgcacc
aggactggctgaatggcaaggagtacaagtgcaaggtctccaacaaagccctcccagcccccatcgagaaaacaatctccaaag
ccaaagggcagccccgagaaccacaggtgtacaccctgcccccatcccgggatgagctgaccaagaaccaggtcagcctgacc
tgcctggtcaaaggcttctatcccagcgacatcgccgtggagtgggagagcaatgggcagccggagaacaactacaagaccac
gcctcccgtgctggactccgacggctccttcttcctctacagcaagctcaccgtggacaagagcaggtggcagcaggggaacgtc
ttctcatgctccgtgatgcatgaggctctgcacaaccactacacgcagaagagcctctccctgtctccgggtaaatgatctaga
AA
5B9 ScFV MTHWTCH2CH3
MRFSAQLLGLLVLWIPGSTADIVMTQAAFSNPVTLGTSASISCRSSKS
LLHSNGITYLYWYLQKPGQSPQLLIYQMSNLASGVPDRESSSGSGTDFTLRISRVEA
EDVGVYYCAQNLELPLTFGAGTKLELKRGGGGSGGGGSGGGGSSQVQLKQSGPG
LVQSSQSLSITCTVSGFSLTTYAVHWVRQSPGKGLEWLGVIWSGGITDYNAAFISR
LSITKDDSKSQVFFKMNSLQPNDTAIYYCARNGGDNYPYYYAMDYWGQGTSVTV
SSDQEPKSSDKTHTSPPSPAPELLGGPSVFLFPPKPKDTLMISRTPEVTCVVVDVSHE
DPEVKFNWYVDGVEVHNAKTKPREEQYNSTYRVVSVLTVLHQDWLNGKEYKCK
VSNKALPAPIEKTISKAKGQPREPQVYTLPPSRDELTKNQVSLTCLVKGFYPSDIAV
EWESNGQPENNYKTTPPVLDSDGSFFLYSKLTVDKSRWQQGNVFSCSVMHEALH
NHYTQKSLSLSPGK
Human IgG 1 hinge mutations
2H7 ScFV- MTH (CSS) WTCH2CH3
Nucleotide:
aagcttgccgccatggattttcaagtgcagattttcagcttcctgctaatcagtgcttcagtcataattgccagag
gacaaattgttctctcccagtctccagcaatcctgtctgcatctccaggggagaaggtcacaatgacttgcagggccagctcaagtg
taagttacatgcactggtaccagcagaagccaggatcctcccccaaaccctggatttatgccccatccaacctggcttctggagtcc
ctgctcgcttcagtggcagtgggtctgggacctcttactctctcacaatcagcagagtggaggctgaagatgctgccacttattactg
ccagcagtggagttttaacccacccacgttcggtgctgggaccaagctggagctgaaagatggcggtggctcgggcggtggtgg
atctggaggaggtgggagctctcaggcttatctacagcagtctggggctgagctggtgaggcctggggcctcagtgaagatgtcct
gcaaggcttctggctacacatttaccagttacaatatgcactgggtaaagcagacacctagacagggcctggaatggattggagct
atttatccaggaaatggtgatacttcctacaatcagaagttcaagggcaaggccacactgactgtagacaaatcctccagcacagcc
tacatgcagctcagcagcctgacatctgaagactctgcggtctatttctgtgcaagagtggtgtactatagtaactcttactggtactte
gatgtctggggcacagggaccacggtcaccgtctcttctgatcaggagcccaaatcttgtgacaaaactcacacatccccaccgtc
cccagcacctgaactcctggggggaccgtcagtcttcctcttccccccaaaacccaaggacaccctcatgatctcccggacccctg
aggtcacatgcgtggtggtggacgtgagccacgaagaccctgaggtcaagttcaactggtacgtggacggcgtggaggtgcata
atgccaagacaaagccgcgggaggagcagtacaacagcacgtaccgtgtggtcagcgtcctcaccgtcctgcaccaggactgg
ctgaatggcaaggagtacaagtgcaaggtctccaacaaagccctcccagcccccatcgagaaaacaatctccaaagccaaaggg
cagccccgagaaccacaggtgtacaccctgcccccatcccgggatgagctgaccaagaaccaggtcagcctgacctgcctggtc
aaaggcttctatcccagcgacatcgccgtggagtgggagagcaatgggcagccggagaacaactacaagaccacgcctcccgt
gctggactccgacggctccttcttcctctacagcaagctcaccgtggacaagagcaggtggcagcaggggaacgtcttctcatgct
ccgtgatgcatgaggctctgcacaaccactacacgcagaagagcctctccctgtctccgggtaaatgatctaga
2H7 ScFV- MTH (CSS) WTCH2CH3 Protein:
mdfqvqifsfllisasviiargqivlsqspailsaspgekvtmtcrasssvsymhwyqqkpgsspkpwiy
apsnlasgvparfsgsgsgtsysltisrveaedaatyycqqwsfnpptfgagtklelkdgggsggggsggggssqaylqqsgac
lvrpgasvkmsckasgytftsynmhwvkqtprqglewigaiypgngdtsynqkfkgkatltvdkssstaymqlssltsedsa
vyfcarvvyysnsywyfdvwgtgttvtvssdqepkscdkthtsppspapellggpsvflfppkpkdtlmisrtpevtcvvvdv
shedpevkfnwyvdgvevhnaktkpreeqynstyrvvsvltvlhqdwlflgkeykckvsnkalpapiektiskakgqprep
qvytlppsrdeltknqvsltclvkgfypsdiavewesngqpennykttppvldsdgsfflyskltvdksrwqqgnvfscsvmh
ealhnhytqkslslspgk
2H7 ScFv- MTH (SCS) WTCH2CH3:
Nucleotide:
aagcttgccgccatggattttcaagtgcagattttcagcttcctgctaatcagtgcttcagtcataattgccagag
gacaaattgttctctcccagtctccagcaatcctgtctgcatctccaggggagaaggtcacaatgacttgcagggccagctcaagtg
taagttacatgcactggtaccagcagaagccaggatcctcccccaaaccctggatttatgccccatccaacctggcttctggagtcc
ctgctcgcttcagtggcagtgggtctgggacctcttactctctcacaatcagcagagtggaggctgaagatgctgccacttattactg
ccagcagtggagttttaacccacccacgttcggtgctgggaccaagctggagctgaaagatggcggtggctcgggcggtggtgg
atctggaggaggtgggagctctcaggcttatctacagcagtctggggctgagctggtgaggcctggggcctcagtgaagatgtcct
gcaaggcttctggctacacatttaccagttacaatatgcactgggtaaagcagacacctagacagggcctggaatggattggagct
atttatccaggaaatggtgatacttcctacaatcagaagttcaagggcaaggccacactgactgtagacaaatcctccagcacagcc
tacatgcagctcagcagcctgacatctgaagactctgcggtctatttctgtgcaagagtggtgtactatagtaactcttactggtacttc
gatgtctggggcacagggaccacggtcaccgtctcttctgatcaggagcccaaatcttctgacaaaactcacacatgcccaccgtc
cccagcacctgaactcctggggggaccgtcagtcttcctcttccccccaaaacccaaggacaccctcatgatctcccggacccctg
aggtcacatgcgtggtggtggacgtgagccacgaagaccctgaggtcaagttcaactggtacgtggacggcgtggaggtgcata
atgccaagacaaagccgcgggaggagcagtacaacagcacgtaccgtgtggtcagcgtcctcaccgtcctgcaccaggactgg
ctgaatggcaaggagtacaagtgcaaggtctccaacaaagccctcccagcccccatcgagaaaacaatctccaaagccaaaggg
cagccccgagaaccacaggtgtacaccctgcccccatcccgggatgagctgaccaagaaccaggtcagcctgacctgcctggtc
aaaggcttctatcccagcgacatcgccgtggagtgggagagcaatgggcagccggagaacaactacaagaccacgcctcccgt
gctggactccgacggctccttcttcctctacagcaagctcaccgtggacaagagcaggtggcagcaggggaacgtcttctcatgct
ccgtgatgcatgaggctctgcacaaccactacacgcagaagagcctctccctgtctccgggtaaatgatctaga
2H7 ScFV- MTH (SCS) WTCH2CH3 Protein:
mdfqvqifsfllisasviiargqivlsqspailsaspgekvtmtcrasssvsymhwyqqkpgsspkpwiy
apsnlasgvparfsgsgsgtsysltisrveaedaatyycqqwsfnpptfgagtklelkdgggsggggsggggssqaylqqsgac
lvrpgasvkmsckasgytftsynmhwvkqtprqglewigaiypgngdtsynqktkgkatltvdkssstaymqlssltsedsa
vyfcarvvyysnsywyfdvwgtgttvtvssdqepkssdkthtcppspapellggpsvflfppkpkdtlmisrtpevtcvvvdv
shedpevkfnwyvdgvevhnaktkpreeqynstyrvvsvltvlhqdwlngkeykckvsflkalpapiektiskakgqprep
qvytlppsrdeltknqvsltclvkgfypsdiavewesngqpennykttppvldsdgsfflyskltvdksrwqqgflvfscsvmh
ealhnhytqkslslspgk
2H7 scFv- MTH (ssC) wTCH2CH3:
Nucleotide:
aagcttgccgccatggattttcaagtgcagattttcagcttcctgctaatcagtgcttcagtcataattgccagag
gacaaattgttctctcccagtctccagcaatcctgtctgcatctccaggggagaaggtcacaatgacttgcagggccagctcaagtg
taagttacatgcactggtaccagcagaagccaggatcctcccccaaaccctggatttatgccccatccaacctggcttctggagtcc
ctgctcgcttcagtggcagtgggtctgggacctcttactctctcacaatcagcagagtggaggctgaagatgctgccacttattactg
ccagcagtggagttttaacccacccacgttcggtgctgggaccaagctggagctgaaagatggcggtggctcgggcggtggtgg
atctggaggaggtgggagctctcaggcttatctacagcagtctggggctgagctggtgaggcctggggcctcagtgaagatgtcct
gcaaggcttctggctacacatttaccagttacaatatgcactgggtaaagcagacacctagacagggcctggaatggattggagct
atttatccaggaaatggtgatacttcctacaatcagaagttcaagggcaaggccacactgactgtagacaaatcctccagcacagcc
tacatgcagctcagcagcctgacatctgaagactctgcggtctatttctgtgcaagagtggtgtactatagtaactcttactggtacttc
gatgtctggggcacagggaccacggtcaccgtctcttctgatcaggagcccaaatcttctgacaaaactcacacatccccaccgtg
cccagcacctgaactcctggggggaccgtcagtcttcctcttccccccaaaacccaaggacaccctcatgatctcccggacccctg
aggtcacatgcgtggtggtggacgtgagccacgaagaccctgaggtcaagttcaactggtacgtggacggcgtggaggtgcata
atgccaagacaaagccgcgggaggagcagtacaacagcacgtaccgtgtggtcagcgtcctcaccgtcctgcaccaggactgg
ctgaatggcaaggagtacaagtgcaaggtctccaacaaagccctcccagcccccatcgagaaaacaatctccaaagccaaaggg
cagccccgagaaccacaggtgtacaccctgcccccatcccgggatgagctgaccaagaaccaggtcagcctgacctgcctggtc
aaaggcttctatcccagcgacatcgccgtggagtgggagagcaatgggcagccggagaacaactacaagaccacgcctcccgt
gctggactccgacggctccttcttcctctacagcaagctcaccgtggacaagagcaggtggcagcaggggaacgtcttctcatgct
ccgtgatgcatgaggctctgcacaaccactacacgcagaagagcctctccctgtctccgggtaaatgatctaga
2H7 scFv- MTH (ssC) wTCH2CH3 protein:
mdfqvqifsfllisasviiargqivlsqspailsaspgekvtmtcrasssvsymhwyqqkpgsspkpwiy
apsnlasgvparfsgsgsgtsysltisrveaedaatyycqqwsfnpptfgagtklelkdgggsggggsggggssqaylqqsgae
lvrpgasvkmsckasgytftsynmhwvkqtprqglewigaiypgngdtsynqkfkgkatltvdkssstaymqlssltsedsa
vyfcarvvyysnsywyfdvwgtgttvtvssdqepkssdkthtsppcpapellggpsvflfppkpkdtlmisrtpevtcvvvdv
shedpevkfnwyvdgvevhnaktkpreeqynstyrvvsvltvlhqdwlngkeykckvsnkalpapiektiskakgqprep
qvytlppsrdeltknqvsltclvkgfypsdiavewesngqpennykttppvldsdgsfflyskltvdksrwqqgnvfscsvmh
ealhnhytqkslslspgk
HIgGMHcys1
gtt gtt gat cag gag ccc aaa tct tct gac aaa act cac aca tg
HlgGMHcys2
gtt gtt gat cag gag ccc aaa tct tgt gac aaa act cac aca tct cca ccg tgc
HIgGMHcys3
gtt gtt gat cag gag ccc aaa tct tgt gac aaa act cac aca tgt cca ccg tcc cca gca
cct
NT
HuIgG1 MTCH3Y405
gggcagccccgagaaccacaggtgtacaccctgcccccatcccgggaggagatgaccaagaaccaggt
cagcctgacctgcctggtcaaaggcttctatcccagcgacatcgccgtggagtgggagagcaatgggcagccggagaacaacta
caagaccacgcctcccgtgctggactccgacggctccttctacctctatagcaagctcaccgtggacaagagcaggtggcagcag
gggaacgtcttctcatgctccgtgatgcatgaggctctgcacaaccactacacgcagaagagcctctccctgtccccgggtaaatg
a
AA
HuIgG1 MTCH3Y405
GQPREPQVYTLPPSREEMTKNQVSLTCLVKGFYPSDIAVEWESNGQ
PENNYKTTPPVLDSDGSFYLYSKLTVDKSRWQQGNVFSCSVMHEALHNHYTQKS
LSLSPGK
NT
HuIgG1 MTCH3A405
gggcagccccgagaaccacaggtgtacaccctgcccccatcccgggaggagatgaccaagaaccaggt
cagcctgacctgcctggtcaaaggcttctatcccagcgacatcgccgtggagtgggagagcaatgggcagccggagaacaacta
caagaccacgcctcccgtgctggactccgacggctccttcgccctctatagcaagctcaccgtggacaagagcaggtggcagca
ggggaacgtcttctcatgctccgtgatgcatgaggctctgcacaaccactacacgcagaagagcctctccctgtccccgggtaaat
ga
AA
HuIgG1 MTCH3A405
GQPREPQVYTLPPSREEMTKNQVSLTCLVKGFYPSDIAVEWESNGQ
PENNYKTTPPVLDSDGSFALYSKLTVDKSRWQQGNVFSCSVMHEALHNHYTQKS
LSLSPGK
NT
HuIgG1 MTCH3A407
Gggcagccccgagaaccacaggtgtacaccctgcccccatcccgggaggagatgaccaagaaccaggt
cagcctgacctgcctggtcaaaggcttctatcccagcgacatcgccgtggagtgggagagcaatgggcagccggagaacaacta
caagaccacgcctcccgtgctggactccgacggctccttcttcctcgccagcaagctcaccgtggacaagagcaggtggcagca
ggggaacgtcttctcatgctccgtgatgcatgaggctctgcacaaccactacacgcagaagagcctctccctgtccccgggtaaat
ga
AA
HuIgG1 MTCH3A407
GQPREPQVYTLPPSREEMTKNQVSLTCLVKGFYPSDIAVEWESNGQ
PENNYKTTPPVLDSDGSFFLASKLTVDKSRWQQGNVFSCSVMHEALHNHYTQKSL
SLSPGK
NT
HuIgG1 MTCH3Y405A407
gggcagccccgagaaccacaggtgtacaccctgcccccatcccgggaggagatgaccaagaaccaggt
cagcctgacctgcctggtcaaaggcttctatcccagcgacatcgccgtggagtgggagagcaatgggcagccggagaacaacta
caagaccacgcctcccgtgctggactccgacggctccttctacctcgccagcaagctcaccgtggacaagagcaggtggcagca
ggggaacgtcttctcatgctccgtgatgcatgaggctctgcacaaccactacacgcagaagagcctctccctgtccccgggtaaat
ga
AA
HuIgG1 MTCH3Y405A407
GQPREPQVYTLPPSREEMTKNQVSLTCLVKGFYPSDIAVEWESNGQ
PENNYKTTPPVLDSDGSFYLASKLTVDKSRWQQGNVFSCSVMHEALHNHYTQKS
LSLSPGK
NT
HuIgG1 MTCH3A405A407
gggcagccccgagaaccacaggtgtacaccctgcccccatcccgggaggagatgaccaagaaccaggt
cagcctgacctgcctggtcaaaggcttctatcccagcgacatcgccgtggagtgggagagcaatgggcagccggagaacaacta
caagaccacgcctcccgtgctggactccgacggctccttcgccctcgccagcaagctcaccgtggacaagagcaggtggcagc
aggggaacgtcttctcatgctccgtgatgcatgaggctctgcacaaccactacacgcagaagagcctctccctgtccccgggtaaa
tga
AA
HuIgG1 MTCH3A405A407
gqprepqvytlppsreemtknqvsltclvkgfypsdiavewesngqpennykttppvldsdgsfalask
ltvdksrwqqgnvfscsvmhealhnhytqkslslspgk
NT
2H7 scFv MTH (SSS) WTCH2MTCH3Y405
aagcttgccgccatggattttcaagtgcagattttcagcttcctgctaatcagtgcttcagtcataattgccagag
gacaaattgttctctcccagtctccagcaatcctgtctgcatctccaggggagaaggtcacaatgacttgcagggccagctcaagtg
taagttacatgcactggtaccagcagaagccaggatcctcccccaaaccctggatttatgccccatccaacctggcttctggagtcc
ctgctcgcttcagtggcagtgggtctgggacctcttactctctcacaatcagcagagtggaggctgaagatgctgccacttattactg
ccagcagtggagttttaacccacccacgttcggtgctgggaccaagctggagctgaaagatggcggtggctcgggcggtggtgg
atctggaggaggtgggagctctcaggcttatctacagcagtctggggctgagctggtgaggcctggggcctcagtgaagatgtcct
gcaaggcttctggctacacatttaccagttacaatatgcactgggtaaagcagacacctagacagggcctggaatggattggagct
atttatccaggaaatggtgatacttcctacaatcagaagttcaagggcaaggccacactgactgtagacaaatcctccagcacagcc
tacatgcagctcagcagcctgacatctgaagactctgcggtctatttctgtgcaagagtggtgtactatagtaactcttactggtacttc
gatgtctggggcacagggaccacggtcaccgtctcttctgatcaggagcccaaatcttctgacaaaactcacacatccccaccgtc
cccagcacctgaactcctggggggaccgtcagtcttcctcttccccccaaaacccaaggacaccctcatgatctcccggacccctg
aggtcacatgcgtggtggtggacgtgagccacgaagaccctgaggtcaagttcaactggtacgtggacggcgtggaggtgcata
atgccaagacaaagccgcgggaggagcagtacaacagcacgtaccgtgtggtcagcgtcctcaccgtcctgcaccaggactgg
ctgaatggcaaggagtacaagtgcaaggtctccaacaaagccctcccagcccccatcgagaaaacaatctccaaagccaaaggg
cagccccgagaaccacaggtgtacaccctgcccccatcccgggaggagatgaccaagaaccaggtcagcctgacctgcctggt
caaaggcttctatcccagcgacatcgccgtggagtgggagagcaatgggcagccggagaacaactacaagaccacgcctcccg
tgctggactccgacggctccttctacctctatagcaagctcaccgtggacaagagcaggtggcagcaggggaacgtcttctcatgc
tccgtgatgcatgaggctctgcacaaccactacacgcagaagagcctctccctgtccccgggtaaatgatctaga
AA
2H7 scFv MTH (SSS) WTCH2MTCH3Y405
mdfqvqifsfllisasviiargqivlsqspailsaspgekvtmtcrasssvsymhwyqqkpgsspkpwiy
apsnlasgvparfsgsgsgtsysltisrveaedaatyycqqwsfhpptfgagtklelkdgggsggggsggggssqaylqqsgae
lvrpgasvkmsckasgytftsynmhwvkqtprqglewigaiypgflgdtsyflqkfkgkatltvdkssstaylmqlssltsedsa
vyfcarvvyysnsywyfdvwgtgttvtvssdqepkssdkthtsppspapellggpsvflfppkpkdtlmisrtpevtcvvvdv
shedpevkfnwyvdgvevhnaktkpreeqynstyrvvsvltvlhqdwlflgkeykckvsflkalpapiektiskakgqprep
qvytlppsreemtknqvsltclvkgfypsdiavewesngqpeflflykttppv1dsdgsfylyskltvdksrwqqgnvfscsvm
healhnhytqkslslspgk
NT
2H7 scFv MTH (SSS) WTCH2MTCH3A405
aagcttgccgccatggattttcaagtgcagattttcagcttcctgctaatcagtgcttcagtcataattgccagag
gacaaattgttctctcccagtctccagcaatcctgtctgcatctccaggggagaaggtcacaatgacttgcagggccagctcaagtg
taagttacatgcactggtaccagcagaagccaggatcctcccccaaaccctggatttatgccccatccaacctggcttctggagtcc
ctgctcgcttcagtggcagtgggtctgggacctcttactctctcacaatcagcagagtggaggctgaagatgctgccacttattactg
ccagcagtggagttttaacccacccacgttcggtgctgggaccaagctggagctgaaagatggcggtggctcgggcggtggtgg
atctggaggaggtgggagctctcaggcttatctacagcagtctggggctgagctggtgaggcctggggcctcagtgaagatgtcct
gcaaggcttctggctacacatttaccagttacaatatgcactgggtaaagcagacacctagacagggcctggaatggattggagct
atttatccaggaaatggtgatacttcctacaatcagaagttcaagggcaaggccacactgactgtagacaaatcctccagcacagcc
tacatgcagctcagcagcctgacatctgaagactctgcggtctatttctgtgcaagagtggtgtactatagtaactcttactggtacttc
gatgtctggggcacagggaccacggtcaccgtctcttctgatcaggagcccaaatcttctgacaaaactcacacatccccaccgtc
cccagcacctgaactcctggggggaccgtcagtcttcctcttccccccaaaacccaaggacaccctcatgatctcccggacccctg
aggtcacatgcgtggtggtggacgtgagccacgaagaccctgaggtcaagttcaactggtacgtggacggcgtggaggtgcata
atgccaagacaaagccgcgggaggagcagtacaacagcacgtaccgtgtggtcagcgtcctcaccgtcctgcaccaggactgg
ctgaatggcaaggagtacaagtgcaaggtctccaacaaagccctcccagcccccatcgagaaaacaatctccaaagccaaaggg
cagccccgagaaccacaggtgtacaccctgcccccatcccgggaggagatgaccaagaaccaggtcagcctgacctgcctggt
caaaggcttctatcccagcgacatcgccgtggagtgggagagcaatgggcagccggagaacaactacaagaccacgcctcccg
tgctggactccgacggctccttcgccctctatagcaagctcaccgtggacaagagcaggtggcagcaggggaacgtcttctcatg
ctccgtgatgcatgaggctctgcacaaccactacacgcagaagagcctctccctgtccccgggtaaatga
AA
2H7 scFv MTH (SSS) WTCI7I2MTCH3A405
mdfqvqifsfllisasviiargqivlsqspailsaspgekvtmtcrasssvsymhwyqqkpgsspkpwiy
apsnlasgvparfsgsgsgtsysltisrveaedaatyycqqwsfnpptfgagtklelkdgggsggggsggggssqaylqqsgae
lvrpgasvkmsckasgytftsynmhwvkqtprqglewigaiypgngdtsynqktkgkatltvdkssstaymqlssltsedsa
vyfcarvvyysnsywyfdvwgtgttvtvssdqepkssdkthtsppspapellggpsvflfppkpkdtlmisrtpevtcvvvdv
shedpevkfriwyvdgvevhnaktkpreeqynstyrvvsvltvlhqdwlngkeykckvsflkalpapiektiskakgqprep
qvytlppsreemtknqvsltclvkgfypsdiavewesngqpennykttppvldsdgsfalyskltvdksrwqqgnvfscsvm
healhnhytqkslslspgk
NT
2H7 scFv MTH (SSS) WTCH2MTCH3A407
aagcttgccgccatggattttcaagtgcagattttcagcttcctgctaatcagtgcttcagtcataattgccagag
gacaaattgttctctcccagtctccagcaatcctgtctgcatctccaggggagaaggtcacaatgacttgcagggccagctcaagtg
taagttacatgcactggtaccagcagaagccaggatcctcccccaaaccctggatttatgccccatccaacctggcttctggagtcc
ctgctcgcttcagtggcagtgggtctgggacctcttactctctcacaatcagcagagtggaggctgaagatgctgccacttattactg
ccagcagtggagttttaacccacccacgttcggtgctgggaccaagctggagctgaaagatggcggtggctcgggcggtggtgg
atctggaggaggtgggagctctcaggcttatctacagcagtctggggctgagctggtgaggcctggggcctcagtgaagatgtcct
gcaaggcttctggctacacatttaccagttacaatatgcactgggtaaagcagacacctagacagggcctggaatggattggagct
atttatccaggaaatggtgatacttcctacaatcagaagttcaagggcaaggccacactgactgtagacaaatcctccagcacagcc
tacatgcagctcagcagcctgacatctgaagactctgcggtctatttctgtgcaagagtggtgtactatagtaactcttactggtacttc
gatgtctggggcacagggaccacggtcaccgtctcttctgatcaggagcccaaatcttctgacaaaactcacacatccccaccgtc
cccagcacctgaactcctggggggaccgtcagtcttcctcttccccccaaaacccaaggacaccctcatgatctcccggacccctg
aggtcacatgcgtggtggtggacgtgagccacgaagaccctgaggtcaagttcaactggtacgtggacggcgtggaggtgcata
atgccaagacaaagccgcgggaggagcagtacaacagcacgtaccgtgtggtcagcgtcctcaccgtcctgcaccaggactgg
ctgaatggcaaggagtacaagtgcaaggtctccaacaaagccctcccagcccccatcgagaaaacaatctccaaagccaaaggg
cagccccgagaaccacaggtgtacaccctgcccccatcccgggaggagatgaccaagaaccaggtcagcctgacctgcctggt
caaaggcttctatcccagcgacatcgccgtggagtgggagagcaatgggcagccggagaacaactacaagaccacgcctcccg
tgctggactccgacggctccttcttcctcgccagcaagctcaccgtggacaagagcaggtggcagcaggggaacgtcttctcatg
ctccgtgatgcatgaggctctgcacaaccactacacgcagaagagcctctccctgtccccgggtaaatga
AA
2H7 scFv MTH (SSS) WTCH2MTCH3A407
mdfqvqifsfllisasviiargqivlsqspailsaspgekvtmtcrasssvsymhwyqqkpgsspkpwiy
apsnlasgvparfsgsgsgtsysltisrveaedaatyycqqwslhpptfgagtklelkdgggsggggsggggssqaylqqsgac
lvrpgasvkmsckasgytftsynmhwvkqtprqglewigaiypgflgdtsyflqkfkgkatltvdkssstaymqlssltsedsa
vyfcarvvyysnsywyfdvwgtgttvtvssdqepkssdkthtsppspapellggpsvflfppkpkdtlmisrtpevtcvvvdv
shedpevkfnwyvdgvevhnaktkpreeqynstyrvvsvltvlhqdwlngkeykckvsflkalpapiektiskakgqprep
qvytlppsreemtknqvsltclvkgfypsdiavewesngqpennykttppvldsdgsfflaskltvdksrwqqgflvfscsvm
healhnhytqkslslspgk
NT
2H7 scFv MTH (SSS) wTCH2MTCH3Y405A407
aagcttgccgccatggattttcaagtgcagattttcagcttcctgctaatcagtgcttcagtcataattgccagag
gacaaattgttctctcccagtctccagcaatcctgtctgcatctccaggggagaaggtcacaatgacttgcagggccagctcaagtg
taagttacatgcactggtaccagcagaagccaggatcctcccccaaaccctggatttatgccccatccaacctggcttctggagtcc
ctgctcgcttcagtggcagtgggtctgggacctcttactctctcacaatcagcagagtggaggctgaagatgctgccacttattactg
ccagcagtggagttttaacccacccacgttcggtgctgggaccaagctggagctgaaagatggcggtggctcgggcggtggtgg
atctggaggaggtgggagctctcaggcttatctacagcagtctggggctgagctggtgaggcctggggcctcagtgaagatgtcct
gcaaggcttctggctacacatttaccagttacaatatgcactgggtaaagcagacacctagacagggcctggaatggattggagct
atttatccaggaaatggtgatacttcctacaatcagaagttcaagggcaaggccacactgactgtagacaaatcctccagcacagcc
tacatgcagctcagcagcctgacatctgaagactctgcggtctatttctgtgcaagagtggtgtactatagtaactcttactggtacttc
gatgtctggggcacagggaccacggtcaccgtctcttctgatcaggagcccaaatcttctgacaaaactcacacatccccaccgtc
cccagcacctgaactcctggggggaccgtcagtcttcctcttccccccaaaacccaaggacaccctcatgatctcccggacccctg
aggtcacatgcgtggtggtggacgtgagccacgaagaccctgaggtcaagttcaactggtacgtggacggcgtggaggtgcata
atgccaagacaaagccgcgggaggagcagtacaacagcacgtaccgtgtggtcagcgtcctcaccgtcctgcaccaggactgg
ctgaatggcaaggagtacaagtgcaaggtctccaacaaagccctcccagcccccatcgagaaaacaatctccaaagccaaaggg
cagccccgagaaccacaggtgtacaccctgcccccatcccgggaggagatgaccaagaaccaggtcagcctgacctgcctggt
caaaggcttctatcccagcgacatcgccgtggagtgggagagcaatgggcagccggagaacaactacaagaccacgcctcccg
tgctggactccgacggctccttctacctcgccagcaagctcaccgtggacaagagcaggtggcagcaggggaacgtcttctcatg
ctccgtgatgcatgaggctctgcacaaccactacacgcagaagagcctctccctgtccccgggtaaatga
AA
2H7 scFv MTH (SSS) WTCH2MTCH3Y405A407
mdfqvqifsfllisasviiargqivlsqspailsaspgekvtmtcrasssvsymhwyqqkpgsspkpwiy
apsnlasgvparfsgsgsgtsysltisrveaedaatyycqqwsfripptfgagtklelkdgggsggggsggggssqaylqqsgac
lvrpgasvkmsckasgytfisynmhwvkqtprqglewigaiypgngdtsynqkfkgkatltvdkssstaymqlssltsedsa
vyfcarvvyysnsywyfdvwgtgttvtvssdqepkssdkthtsppspapellggpsvflfppkpkdtlmisrtpevtcvvvdv
shedpevkthwyvdgvevhnaktkpreeqynstyrvvsvltvlhqdwlngkeykckvsnkalpapiektiskakgqprep
qvytlppsreemtknqvsltclvkgfypsdiavewesngqpennykttppvldsdgsfylaskltvdksrwqqgnvfscsvm
healhnhytqkslslspgk
NT
2H7 scFv MTH (SSS) WTCH2MTCH3A405A407
aagcttgccgccatggattttcaagtgcagattttcagcttcctgctaatcagtgcttcagtcataattgccagag
gacaaattgttctctcccagtctccagcaatcctgtctgcatctccaggggagaaggtcacaatgacttgcagggccagctcaagtg
taagttacatgcactggtaccagcagaagccaggatcctcccccaaaccctggatttatgccccatccaacctggcttctggagtcc
ctgctcgcttcagtggcagtgggtctgggacctcttactctctcacaatcagcagagtggaggctgaagatgctgccacttattactg
ccagcagtggagttttaacccacccacgttcggtgctgggaccaagctggagctgaaagatggcggtggctcgggcggtggtgg
atctggaggaggtgggagctctcaggcttatctacagcagtctggggctgagctggtgaggcctggggcctcagtgaagatgtcct
gcaaggcttctggctacacatttaccagttacaatatgcactgggtaaagcagacacctagacagggcctggaatggattggagct
atttatccaggaaatggtgatacttcctacaatcagaagttcaagggcaaggccacactgactgtagacaaatcctccagcacagcc
tacatgcagctcagcagcctgacatctgaagactctgcggtctatttctgtgcaagagtggtgtactatagtaactcttactggtacttc
gatgtctggggcacagggaccacggtcaccgtctcttctgatcaggagcccaaatcttctgacaaaactcacacatccccaccgtc
cccagcacctgaactcctggggggaccgtcagtcttcctcttccccccaaaacccaaggacaccctcatgatctcccggacccctg
aggtcacatgcgtggtggtggacgtgagccacgaagaccctgaggtcaagttcaactggtacgtggacggcgtggaggtgcata
atgccaagacaaagccgcgggaggagcagtacaacagcacgtaccgtgtggtcagcgtcctcaccgtcctgcaccaggactgg
ctgaatggcaaggagtacaagtgcaaggtctccaacaaagccctcccagcccccatcgagaaaacaatctccaaagccaaaggg
cagccccgagaaccacaggtgtacaccctgcccccatcccgggaggagatgaccaagaaccaggtcagcctgacctgcctggt
caaaggcttctatcccagcgacatcgccgtggagtgggagagcaatgggcagccggagaacaactacaagaccacgcctcccg
tgctggactccgacggctccttcgccctcgccagcaagctcaccgtggacaagagcaggtggcagcaggggaacgtcttctcatg
ctccgtgatgcatgaggctctgcacaaccactacacgcagaagagcctctccctgtccccgggtaaatga
AA
2H7 scFv MTH (SSS) WTCH2MTCH3A405A407
mdfqvqifsfllisasviiargqivlsqspailsaspgekvtmtcrasssvsymhwyqqkpgsspkpwiy
apsnlasgvparfsgsgsgtsysltisrveaedaatyycqqwsfnpptfgagtklelkdgggsggggsggggssqaylqqsgac
lvrpgasvkmsckasgytftsynmhwvkqtprqglewigaiypgngdtsynqkfkgkatltvdkssstaymqlssltsedsa
vyfcarvvyysnsywyfdvwgtgttvtvssdqepkssdkthtsppspapellggpsvflfppkpkdtlmisrtpevtcvvvdv
shedpevkfnwyvdgvevhnaktkpreeqynstyrvvsvltvlhqdwlngkeykckvsnlalpapiektiskakgqprep
qvytlppsreemtknqvsltclvkgfypsdiavewesngqpennykttppvldsdgsfalaskltvdksrwqqgnvfscsvm
healhnhytqkslslspgk
NT
2H7 scFv MTH (scc) WTCH2CH3
aagcttgccgccatggattttcaagtgcagattttcagcttcctgctaatcagtgcttcagtcataattgccagag
gacaaattgttctctcccagtctccagcaatcctgtctgcatctccaggggagaaggtcacaatgacttgcagggccagctcaagtg
taagttacatgcactggtaccagcagaagccaggatcctcccccaaaccctggatttatgccccatccaacctggcttctggagtcc
ctgctcgcttcagtggcagtgggtctgggacctcttactctctcacaatcagcagagtggaggctgaagatgctgccacttattactg
ccagcagtggagttttaacccacccacgttcggtgctgggaccaagctggagctgaaagatggcggtggctcgggcggtggtgg
atctggaggaggtgggagctctcaggcttatctacagcagtctggggctgagctggtgaggcctggggcctcagtgaagatgtcct
gcaaggcttctggctacacatttaccagttacaatatgcactgggtaaagcagacacctagacagggcctggaatggattggagct
atttatccaggaaatggtgatacttcctacaatcagaagttcaagggcaaggccacactgactgtagacaaatcctccagcacagcc
tacatgcagctcagcagcctgacatctgaagactctgcggtctatttctgtgcaagagtggtgtactatagtaactcttactggtacttc
gatgtctggggcacagggaccacggtcaccgtctcttctgatcaggagcccaaatcttctgacaaaactcacacatgcccaccgtg
cccagcacctgaactcctggggggaccgtcagtcttcctcttccccccaaaacccaaggacaccctcatgatctcccggacccctg
aggtcacatgcgtggtggtggacgtgagccacgaagaccctgaggtcaagttcaactggtacgtggacggcgtggaggtgcata
atgccaagacaaagccgcgggaggagcagtacaacagcacgtaccgtgtggtcagcgtcctcaccgtcctgcaccaggactgg
ctgaatggcaaggagtacaagtgcaaggtctccaacaaagccctcccagcccccatcgagaaaacaatctccaaagccaaaggg
cagccccgagaaccacaggtgtacaccctgcccccatcccgggatgagctgaccaagaaccaggtcagcctgacctgcctggtc
aaaggcttctatcccagcgacatcgccgtggagtgggagagcaatgggcagccggagaacaactacaagaccacgcctcccgt
gctggactccgacggctccttcttcctctacagcaagctcaccgtggacaagagcaggtggcagcaggggaacgtcttctcatgct
ccgtgatgcatgaggctctgcacaaccactacacgcagaagagcctctccctgtctccgggtaaatgatctaga
AA
2H7 scFv MTH (SCC) WTCH2CH3
mdfqvqifsfllisasviiargqivlsqspailsaspgekvtmtcrasssvsymhwyqqkpgsspkpwiy
apsnlasgvparfsgsgsgtsysltisrveaedaatyycqqwsfnpptfgagtklelkdgggsggggsggggssqaylqqsgac
lvrpgasvkmsckasgytftsynmhwvkqtprqglewigaiypgngdtsynqkfkgkatltvdkssstaymqlssltsedsa
vyfcarvvyysnsywyfdvwgtgttvtvssdqepkssdkthtcppcpapellggpsvflfppkpkdtlmisrtpevtcvvvdv
shedpevkfnwyvdgvevhnaktkpreeqynstyrvvsvltvlhqdwlngkeykckvsnkalpapiektiskakgqprep
qvytlppsrdeltknqvsltclvkgfypsdiavewesngqpennykttppvldsdgsfflyskltvdksrwqqgnvfscsvmh
ealhnhytqkslslspgk
NT
2117 scFv MTH (CSC) WTCH2CH3
aagcttgccgccatggattttcaagtgcagattttcagcttcctgctaatcagtgcttcagtcataattgccagag
gacaaattgttctctcccagtctccagcaatcctgtctgcatctccaggggagaaggtcacaatgacttgcagggccagctcaagtg
taagttacatgcactggtaccagcagaagccaggatcctcccccaaaccctggatttatgccccatccaacctggcttctggagtcc
ctgctcgcttcagtggcagtgggtctgggacctcttactctctcacaatcagcagagtggaggctgaagatgctgccacttattactg
ccagcagtggagttttaacccacccacgttcggtgctgggaccaagctggagctgaaagatggcggtggctcgggcggtggtgg
atctggaggaggtgggagctctcaggcttatctacagcagtctggggctgagctggtgaggcctggggcctcagtgaagatgtcct
gcaaggcttctggctacacatttaccagttacaatatgcactgggtaaagcagacacctagacagggcctggaatggattggagct
atttatccaggaaatggtgatacttcctacaatcagaagttcaagggcaaggccacactgactgtagacaaatcctccagcacagcc
tacatgcagctcagcagcctgacatctgaagactctgcggtctatttctgtgcaagagtggtgtactatagtaactcttactggtacttc
gatgtctggggcacagggaccacggtcaccgtctcttctgatcaggagcccaaatcttgtgacaaaactcacacatctccaccgtg
cccagcacctgaactcctggggggaccgtcagtcttcctcttccccccaaaacccaaggacaccctcatgatctcccggacccctg
aggtcacatgcgtggtggtggacgtgagccacgaagaccctgaggtcaagttcaactggtacgtggacggcgtggaggtgcata
atgccaagacaaagccgcgggaggagcagtacaacagcacgtaccgtgtggtcagcgtcctcaccgtcctgcaccaggactgg
ctgaatggcaaggagtacaagtgcaaggtctccaacaaagccctcccagcccccatcgagaaaacaatctccaaagccaaaggg
cagccccgagaaccacaggtgtacaccctgcccccatcccgggatgagctgaccaagaaccaggtcagcctgacctgcctggtc
aaaggcttctatcccagcgacatcgccgtggagtgggagagcaatgggcagccggagaacaactacaagaccacgcctcccgt
gctggactccgacggctccttcttcctctacagcaagctcaccgtggacaagagcaggtggcagcaggggaacgtcttctcatgct
ccgtgatgcatgaggctctgcacaaccactacacgcagaagagcctctccctgtctccgggtaaatgatctaga
AA
2H7 scFv MTH (CSC) WTCH2CH3
mdfqvqifsfllisasviiargqivlsqspailsaspgekvtmtcrasssvsymhwyqqkpgsspkpwiy
apsnlasgvparfsgsgsgtsysltisrveaedaatyycqqwsfnpptfgagtklelkdgggsggggsggggssqaylqqsgac
lvrpgasvkmsckasgytftsynmhwvkqtprqglewigaiypgngdtsynqkfkgkatltvdkssstaymqlssltsedsa
vyfcarvvyysnsywyfdvwgtgttvtvssdqepkscdkthtsppcpapellggpsvflfppkpkdtlmisrtpevtcvvvdv
shedpevkfnwyvdgvevhnaktkpreeqynstyrvvsvltvlhqdwlngkeykckvsnkalpapiektiskakgqprep
qvytlppsrdeltknqvsltclvkgfypsdiavewesngennykttppvldsdgsfflyskltvdksrwqqgnvfscsvmh
ealhnhytqkslslspgk
NT
2H7 scFv MTH (ccs) WTCH2CH3
aagcttgccgccatggattttcaagtgcagattttcagcttcctgctaatcagtgcttcagtcataattgccagag
gacaaattgttctctcccagtctccagcaatcctgtctgcatctccaggggagaaggtcacaatgacttgcagggccagctcaagtg
taagttacatgcactggtaccagcagaagccaggatcctcccccaaaccctggatttatgccccatccaacctggcttctggagtcc
ctgctcgcttcagtggcagtgggtctgggacctcttactctctcacaatcagcagagtggaggctgaagatgctgccacttattactg
ccagcagtggagttttaacccacccacgttcggtgctgggaccaagctggagctgaaagatggcggtggctcgggcggtggtgg
atctggaggaggtgggagctctcaggcttatctacagcagtctggggctgagctggtgaggcctggggcctcagtgaagatgtcct
gcaaggcttctggctacacatttaccagttacaatatgcactgggtaaagcagacacctagacagggcctggaatggattggagct
atttatccaggaaatggtgatacttcctacaatcagaagttcaagggcaaggccacactgactgtagacaaatcctccagcacagcc
tacatgcagctcagcagcctgacatctgaagactctgcggtctatttctgtgcaagagtggtgtactatagtaactcttactggtacttc
gatgtctggggcacagggaccacggtcaccgtctcttctgatcaggagcccaaatcttgtgacaaaactcacacatgtccaccgtc
cccagcacctgaactcctggggggaccgtcagtcttcctcttccccccaaaacccaaggacaccctcatgatctcccggacccctg
aggtcacatgcgtggtggtggacgtgagccacgaagaccctgaggtcaagttcaactggtacgtggacggcgtggaggtgcata
atgccaagacaaagccgcgggaggagcagtacaacagcacgtaccgtgtggtcagcgtcctcaccgtcctgcaccaggactgg
ctgaatggcaaggagtacaagtgcaaggtctccaacaaagccctcccagcccccatcgagaaaacaatctccaaagccaaaggg
cagccccgagaaccacaggtgtacaccctgcccccatcccgggatgagctgaccaagaaccaggtcagcctgacctgcctggtc
aaaggcttctatcccagcgacatcgccgtggagtgggagagcaatgggcagccggagaacaactacaagaccacgcctcccgt
gctggactccgacggctccttcttcctctacagcaagctcaccgtggacaagagcaggtggcagcaggggaacgtcttctcatgct
ccgtgatgcatgaggctctgcacaaccactacacgcagaagagcctctccctgtctccgggtaaatgatctaga
AA
2H7 scFv MTH (ccs) WTCH2CH3
mdfqvqifsfllisasviiargqivlsqspailsaspgekvtmtcrasssvsymhwyqqkpgsspkpwiy
apsnlasgvparfsgsgsgtsysltisrveaedaatyycqqwsfnpptfgagtklelkdgggsggggsggggssqaylqqsgae
lvrpgasvkmsckasgytftsynmhwvkqtprqglewigaiypgngdtsynqktkgkatltvdkssstaymqlssltsedsa
vyfcarvvyysnsywyfdvwgtgttvtvssdqepkscdkthtcppspapellggpsvflfppkpkdflmisrtpevtcvvvdv
shedpevkthwyvdgvevhnaktkpreeqynstyrvvsvltvlhqdwlngkeykckvsnkalpapiektiskakgqprep
qvytlppsrdeltknqvsltclvkgfypsdiavewesngqpennykttppvldsdgsfflyskltvdksrwqqgnvfscsvmh
ealhnhytqkslslspgk
NT
2H7 scFv MTH (CCS) WTCH2CH3
tgatcagccagttccctcaactccacctaccccatctccctcaactccacctaccccatctccctcatgctgcc
acccccgactgtcactgcaccgaccggccctcgaggacctgctcttaggttcagaagcgatcctcacgtgcacactgaccggcct
gagagatgcctcaggtgtcaccttcacctggacgccctcaagtgggaagagcgctgttcaaggaccacctgaccgtgacctctgt
ggctgctacagcgtgtccagtgtcctgccgggctgtgccgagccatggaaccatgggaagaccttcacttgcactgctgcctaccc
cgagtccaagaccccgctaaccgccaccctctcaaaatccggaaacacattccggcccgaggtccacctgctgccgccgccgtc
ggaggagctggccctgaacgagctggtgacgctgacgtgcctggcacgtggcttcagccccaaggatgtgctggttcgctggct
gcaggggtcacaggagctgccccgcgagaagtacctgacttgggcatcccggcaggagcccagccagggcaccaccaccttc
gctgtgaccagcatactgcgcgtggcagccgaggactggaagaagggggacaccttctcctgcatggtgggccacgaggccct
gccgctggccttcacacagaagaccatcgaccgcttggcgggtaaacccacccatgtcaatgtgtctgttgtcatggcggaggtgg
acgcggatccttcgaac
AA
HuIgAHIgA-T4-ORF
Dpvpstpptpspstpptpspscchprlslhrpaledlllgseailtctltglrdasgvtftwtpssgksavqg
ppdrdlcgcysvssvlpgcacpwnhgktftctaaypesktpltatlsksgntfrpevhllpppseelalnelvtltclargfspkdvl
vrwlqgsqelprekyltwasrqepsqgtttfavtsilrvaacdwkkgdtfscmvghealplaftqktidrlagkpthvnvsvvm
aevdadpsn
NT
HuIgAHIgA-T4-ORF
tgatcagccagttccctcaactccacctaccccatctccctcaactccacctaccccatctccctcatgctgcc
acccccgactgtcactgcaccgaccggccctcgaggacctgctcttaggttcagaagcgatcctcacgtgcacactgaccggcct
gagagatgcctcaggtgtcaccttcacctggacgccctcaagtgggaagagcgctgttcaaggaccacctgaccgtgacctctgt
ggctgctacagcgtgtccagtgtcctgccgggctgtgccgagccatggaaccatgggaagaccttcacttgcactgctgcctaccc
cgagtccaagaccccgctaaccgccaccctctcaaaatccggaaacacattccggcccgaggtccacctgctgccgccgccgtc
ggaggagctggccctgaacgagctggtgacgctgacgtgcctggcacgtggcttcagccccaaggatgtgctggttcgctggct
gcaggggtcacaggagctgccccgcgagaagtacctgacttgggcatcccggcaggagcccagccagggcaccaccaccttc
gctgtgaccagcatactgcgcgtggcagccgaggactggaagaagggggacaccttctcctgcatggtgggccacgaggccct
gccgctggccttcacacagaagaccatcgaccgcttggcgggtaaacccacccatgtcaatgtgtctgttgtcatggcggaggtgg
acgcggatccttcgaac
AA
HuIgAHIgA-T4-ORF
dqpvpstpptpspstpptpspscchprlslhrpaledlllgseailtctltglrdasgvtftwtpssgksavqg
ppdrdlcgcysvssvlpgcacpwnhgktftctaaypesktpltatlsksgntfrpevhllpppseelalnelvtltclargfspkdvl
vrwlqgsqelprekyltwasrqepsqgtttfavtsilrvaacdwkkgdtfscmvghealplaftqktidrlagkpthvnvsvvm
aevdadpsn
NT
1D8-IgAH IgA-T4-CD80
aagcttatggattttcaagtgcagattttcagcttcctgctaatcagtgcttcagtcataatgtccagaggagtcg
acattgtgctcactcagtctccaacaaccatagctgcatctccaggggagaaggtcaccatcacctgccgtgccagctccagtgtaa
gttacatgtactggtaccagcagaagtcaggcgcctcccctaaactctggatttatgacacatccaagctggcttctggagttccaaa
tcgcttcagtggcagtgggtctgggacctcttattctctcgcaatcaacaccatggagactgaagatgctgccacttattactgtcagc
agtggagtagtactccgctcacgttcgggtctgggaccaagctggagatcaaacggggtggcggtggctcgggcggtggtgggt
cgggtggcggcggatctcaggtgcagctgaaggaggcaggacctggcctggtgcaaccgacacagaccctgtccctcacatgc
actgtctctgggttctcattaaccagcgatggtgtacactggattcgacagcctccaggaaagggtctggaatggatgggaataatat
attatgatggaggcacagattataattcagcaattaaatccagactgagcatcagcagggacacctccaagagccaagttttcttaaa
aatcaacagtctgcaaactgatgacacagccatgtattactgtgccagaatccactttgattactggggccaaggagtcatggtcaca
gtctcctctgatcagccagttccctcaactccacctaccccatctccctcaactccacctaccccatctccctcatgctgccacccccg
actgtcactgcaccgaccggccctcgaggacctgctcttaggttcagaagcgatcctcacgtgcacactgaccggcctgagagat
gcctcaggtgtcaccttcacctggacgccctcaagtgggaagagcgctgttcaaggaccacctgaccgtgacctctgtggctgcta
cagcgtgtccagtgtcctgccgggctgtgccgagccatggaaccatgggaagaccttcacttgcactgctgcctaccccgagtcca
agaccccgctaaccgccaccctctcaaaatccggaaacacattccggcccgaggtccacctgctgccgccgccgtcggaggag
ctggccctgaacgagctggtgacgctgacgtgcctggcacgtggcttcagccccaaggatgtgctggttcgctggctgcaggggt
cacaggagctgccccgcgagaagtacctgacttgggcatcccggcaggagcccagccagggcaccaccaccttcgctgtgacc
agcatactgcgcgtggcagccgaggactggaagaagggggacaccttctcctgcatggtgggccacgaggccctgccgctggc
cttcacacagaagaccatcgaccgcttggcgggtaaacccacccatgtcaatgtgtctgttgtcatggcggaggtggacgcggatc
cttcgaacaacctgctcccatcctgggccattaccttaatctcagtaaatggaatttttgtgatatgctgcctgacctactgctttgcccc
aagatgcagagagagaaggaggaatgagagattgagaagggaaagtgtacgccctgtataaatcgatac
AA
1D8 scFv IgAH IgA-T4-CD80
mdfqvqifsfllisasvimsrgvdivltqspttiaaspgekvtitcrasssvsymywyqqksgaspklwiy
dtsklasgvpnrfsgsgsgtsyslaintmetedaatyycqqwsstpltfgsgtkleikrggggsggggsggggsqvqlkcagpg
lvqptqtlsltctvsgfsltsdgvhwirqppgkglewmgttyydggtdynsaiksrlsisrdtsksqvflkinslqtddtamyyca
rihfdywgqgvmvtvssdqpvpstpptpspstpptpspscchprlslhrpaledlllgseailtctltglrdasgvtfiwtpssgks
avqgppdrdlcgcysvssvlpgcacpwnhgktfictaaypesktpltatlsksgntfrpevhllpppseelalnelvtltclargfs
pkdvlvrwlqgsqelprekyltwasrqepsqgtttfavtsilrvaacdwkkgdtfscmvghealplaftqktidrlagkpthvnv
svvmaevdadpsnnllpswaitlisvngifviccltycfaprcrerrrnerlrresvrpv
NT
human IgE Fc (CH3—CH3—CH4) ORF:
tgatcacgtctgctccagggacttcaccccgcccaccgtgaagatcttacagtcgtcctgcgacggcggcg
ggcacttccccccgaccatccagctcctgtgcctcgtctctgggtacaccccagggactatcaacatcacctggctggaggacgg
gcaggtcatggacgtggacttgtccaccgcctctaccacgcaggagggtgagctggcctccacacaaagcgagctcaccctcag
ccagaagcactggctgtcagaccgcacctacacctgccaggtcacctatcaaggtcacacctttgaggacagcaccaagaagtgt
gcagattccaacccgagaggggtgagcgcctacctaagccggcccagcccgttcgacctgttcatccgcaagtcgcccacgatc
acctgtctggtggtggacctggcacccagcaaggggaccgtgaacctgacctggtcccgggccagtgggaagcctgtgaacca
ctccaccagaaaggaggagaagcagcgcaatggcacgttaaccgtcacgtccaccctgccggtgggcacccgagactggatcg
agggggagacctaccagtgcagggtgacccacccccacctgcccagggccctcatgcggtccacgaccaagaccagcggccc
gcgtgctgccccggaagtctatgcgtttgcgacgccggagtggccggggagccgggacaagcgcaccctcgcctgcctgatcc
agaacttcatgcctgaggacatctcggtgcagtggctgcacaacgaggtgcagctcccggacgcccggcacagcacgacgcag
ccccgcaagaccaagggctccggcttcttcgtcttcagccgcctggaggtgaccagggccgaatgggagcagaaagatgagttc
atctgccgtgcagtccatgaggcagcgagcccctcacagaccgtccagcgagcggtgtctgtaaatcccggtaaagcggatcctt
cgaa
AA
human IgE Fe (CH3—CH3—CH4) ORF:
dhvcsrdftpptvkilqsscdggghfjptiqllclvsgytpgtinitwledgqvmdvdlstasttqegelast
qseltlsqkhwlsdrtytcqvtyqghtfedstkkcadsnprgvsaylsrpspfdlfirksptitclvvdlapskgtvnhwsrasgk
pvnhstrkeekqrngtltvtstlpvgtrdwiegctyqcrvthphlpralmrsttktsgpraapevyafatpewpgsrdkrtlacliq
nfrnpedisvqwlhnevqlpdarhsttqprktkgsgffvfsrlevtraeweqkdeficravhcaaspsqtvqravsvnpgkadp
s
NT
1D8 scFv-human IgE Fc (CH3—CH3—CH4)-CD80
aagcttatggattttcaagtgcagattttcagcttcctgctaatcagtgcttcagtcataatgtccagaggagtcg
acattgtgctcactcagtctccaacaaccatagctgcatctccaggggagaaggtcaccatcacctgccgtgccagctccagtgtaa
gttacatgtactggtaccagcagaagtcaggcgcctcccctaaactctggatttatgacacatccaagctggcttctggagttccaaa
tcgcttcagtggcagtgggtctgggacctcttattctctcgcaatcaacaccatggagactgaagatgctgccacttattactgtcagc
agtggagtagtactccgctcacgttcgggtctgggaccaagctggagatcaaacggggtggcggtggctcgggcggtggtgggt
cgggtggcggcggatctcaggtgcagctgaaggaggcaggacctggcctggtgcaaccgacacagaccctgtccctcacatgc
actgtctctgggttctcattaaccagcgatggtgtacactggattcgacagcctccaggaaagggtctggaatggatgggaataatat
attatgatggaggcacagattataattcagcaattaaatccagactgagcatcagcagggacacctccaagagccaagttttcttaaa
aatcaacagtctgcaaactgatgacacagccatgtattactgtgccagaatccactttgattactggggccaaggagtcatggtcaca
gtctcctctgatcacgtctgctccagggacttcaccccgcccaccgtgaagatcttacagtcgtcctgcgacggcggcgggcacttc
cccccgaccatccagctcctgtgcctcgtctctgggtacaccccagggactatcaacatcacctggctggaggacgggcaggtca
tggacgtggacttgtccaccgcctctaccacgcaggagggtgagctggcctccacacaaagcgagctcaccctcagccagaagc
actggctgtcagaccgcacctacacctgccaggtcacctatcaaggtcacacctttgaggacagcaccaagaagtgtgcagattcc
aacccgagaggggtgagcgcctacctaagccggcccagcccgttcgacctgttcatccgcaagtcgcccacgatcacctgtctgg
tggtggacctggcacccagcaaggggaccgtgaacctgacctggtcccgggccagtgggaagcctgtgaaccactccaccaga
aaggaggagaagcagcgcaatggcacgttaaccgtcacgtccaccctgccggtgggcacccgagactggatcgagggggaga
cctaccagtgcagggtgacccacccccacctgcccagggccctcatgcggtccacgaccaagaccagcggcccgcgtgctgcc
ccggaagtctatgcgtttgcgacgccggagtggccggggagccgggacaagcgcaccctcgcctgcctgatccagaacttcatg
cctgaggacatctcggtgcagtggctgcacaacgaggtgcagctcccggacgcccggcacagcacgacgcagccccgcaaga
ccaagggctccggcttcttcgtcttcagccgcctggaggtgaccagggccgaatgggagcagaaagatgagttcatctgccgtgc
agtccatgaggcagcgagcccctcacagaccgtccagcgagcggtgtctgtaaatcccggtaaagcggatccttcgaagctccca
tcctgggccattaccttaatctcagtaaatggaatttttgtgatatgctgcctgacctactgctttgccccaagatgcagagagagaag
gaggaatgagagattgagaagggaaagtgtacgccctgtataaatcgata
AA 1D8-scFv-human IgE Fc (CH3—CH3—CH4)-CD80
mdfqvqifsfllisasvimsrgvdivhqspttiaaspgekvtitcrasssvsymywyqqksgaspklwiy
dtsklasgvpnrfsgsgsgtsyslaintmetedaatyycqqwsstpltfgsgtkleikrggggsggggsggggsqvqlkcagpg
lvqptqtlsltctvsgfsltsdgvhwirqppgkglewmgttyydggtdynsaiksrlsisrdtsksqvflkinslqtddtamyyca
rihfdywgqgvmvtvssdhvcsrdftpptvkilqsscdggghfpptiqllclvsgytpgtinitwledgqvmdvdlstasttqe
gelastqseltlsqkhwlsdrtytcqvtyqghtfedstkkcadsnprgvsaylsrpspfdlfirksptitclvvdlapskgtvnltws
rasgkpvnhstrkeekqmgtltvtstlpvgtrdwiegetyqcrvthphlpralmrsttktsgpraapevyafatpewpgsrdkrt
lacliqnfmpedisvqwlhnevqlpdarhsttqprktkgsgffvfsrlevtraeweqkdeficravhcaaspsqtvqravsvnp
gkadpsklpswaitlisvngifviccltycfaprcrerrrnerlrresvrpv
NT
5B9-IgAH IgA-T4-CD80
aagcttgccgccatgaggttctctgctcagcttctggggctgcttgtgctctggatccctggatccactgcaga
tattgtgatgacgcaggctgcattctccaatccagtcactcttggaacatcagcttccatctcctgcaggtctagtaagagtctcctaca
tagtaatggcatcacttatttgtattggtatctgcagaagccaggccagtctcctcagctcctgatttatcagatgtccaaccttgcctca
ggagtcccagacaggttcagtagcagtgggtcaggaactgatttcacactgagaatcagcagagtggaggctgaggatgtgggtg
tttattactgtgctcaaaatctagaacttccgctcacgttcggtgctgggaccaagctggagctgaaacggggtggcggtggctcgg
gcggtggtgggtcgggtggcggcggatcgtcacaggtgcagctgaagcagtcaggacctggcctagtgcagtcctcacagagc
ctgtccatcacctgcacagtctctggtttctcattaactacctatgctgtacactgggttcgccagtctccaggaaagggtctggagtg
gctgggagtgatatggagtggtggaatcacagactataatgcagctttcatatccagactgagcatcaccaaggacgattccaaga
gccaagttttctttaaaatgaacagtctgcaacctaatgacacagccatttattactgtgccagaaatgggggtgataactacccttatt
actatgctatggactactggggtcaaggaacctcagtcaccgtctcctctgatcagccagttccctcaactccacctaccccatctcc
ctcaactccacctaccccatctccctcatgctgccacccccgactgtcactgcaccgaccggccctcgaggacctgctcttaggttc
agaagcgatcctcacgtgcacactgaccggcctgagagatgcctcaggtgtcaccttcacctggacgccctcaagtgggaagag
cgctgttcaaggaccacctgaccgtgacctctgtggctgctacagcgtgtccagtgtcctgccgggctgtgccgagccatggaacc
atgggaagaccttcacttgcactgctgcctaccccgagtccaagaccccgctaaccgccaccctctcaaaatccggaaacacattc
cggcccgaggtccacctgctgccgccgccgtcggaggagctggccctgaacgagctggtgacgctgacgtgcctggcacgtgg
cttcagccccaaggatgtgctggttcgctggctgcaggggtcacaggagctgccccgcgagaagtacctgacttgggcatcccgg
caggagcccagccagggcaccaccaccttcgctgtgaccagcatactgcgcgtggcagccgaggactggaagaagggggaca
ccttctcctgcatggtgggccacgaggccctgccgctggccttcacacagaagaccatcgaccgcttggcgggtaaacccaccca
tgtcaatgtgtctgttgtcatggcggaggtggacgcggatccttcgaacaacctgctcccatcctgggccattaccttaatctcagtaa
atggaatttttgtgatatgctgcctgacctactgctttgccccaagatgcagagagagaaggaggaatgagagattgagaagggaa
agtgtacgccctgtataaatcgatac
AA
5B9-LgAH IgA-T4-CD80
mrfsaqllgllvlwipgstadivmtqaafsnpvtlgtsasiscrssksllhsngttylywylqkpgqspqlli
yqmsnlasgvpdrfsssgsgtdftlrisrveaedvgvyycaqnlelpltfgagtklelkrggggsggggsggggssqvqlkqsg
pglvqssqslsitctvsgfslttyavhwvrqspgkglewlgviwsggttdynaafisrisitkddsksqvftkmnslqpndtaiy
ycarnggdnypyyyamdywgqgtsvtvssdqpvpstpptpspstpptpspscchprlslhrpaledlllgseailtctltglrda
sgvtfiwtpssgksavqgppdrdlcgcysvssvlpgcacpwnhgktfictaaypesktpltatlsksgntfrpevhllpppseel
alnelvtltclargfspkdvlvrwlqgsqelprekyltwasrqepsqgtttfavtsilrvaacdwkkgdtfscmvghealplaftqk
tidrlagkpthvnvsvvmaevdadpsnnllpswaitlisvngifviccltycfaprcrerrrnerlrresvrpv
NT
5B9-scFv-human IgE Fc (CH3—CH3—CH4)-CD80
aagcttgccgccatgaggttctctgctcagcttctggggctgcttgtgctctggatccctggatccactgcaga
tattgtgatgacgcaggctgcattctccaatccagtcactcttggaacatcagcttccatctcctgcaggtctagtaagagtctcctaca
tagtaatggcatcacttatttgtattggtatctgcagaagccaggccagtctcctcagctcctgatttatcagatgtccaaccttgcctca
ggagtcccagacaggttcagtagcagtgggtcaggaactgatttcacactgagaatcagcagagtggaggctgaggatgtgggtg
tttattactgtgctcaaaatctagaacttccgctcacgttcggtgctgggaccaagctggagctgaaacggggtggcggtggctcgg
gcggtggtgggtcgggtggcggcggatcgtcacaggtgcagctgaagcagtcaggacctggcctagtgcagtcctcacagagc
ctgtccatcacctgcacagtctctggtttctcattaactacctatgctgtacactgggttcgccagtctccaggaaagggtctggagtg
gctgggagtgatatggagtggrggaatcacagactataatgcagctttcatatccagactgagcatcaccaaggacgattccaaga
gccaagttttctttaaaatgaacagtctgcaacctaatgacacagccatttattactgtgccagaaatgggggtgataactacccttatt
actatgctatggactactggggtcaaggaacctcagtcaccgtctcctctgatcacgtctgctccagggacttcaccccgcccaccg
tgaagatcttacagtcgtcctgcgacggcggcgggcacttccccccgaccatccagctcctgtgcctcgtctctgggtacacccca
gggactatcaacatcacctggctggaggacgggcaggtcatggacgtggacttgtccaccgcctctaccacgcaggagggtgag
ctggcctccacacaaagcgagctcaccctcagccagaagcactggctgtcagaccgcacctacacctgccaggtcacctatcaag
gtcacacctttgaggacagcaccaagaagtgtgcagattccaacccgagaggggtgagcgcctacctaagccggcccagcccgt
tcgacctgttcatccgcaagtcgcccacgatcacctgtctggtggtggacctggcacccagcaaggggaccgtgaacctgacctg
gtcccgggccagtgggaagcctgtgaaccactccaccagaaaggaggagaagcagcgcaatggcacgttaaccgtcacgtcca
ccctgccggtgggcacccgagactggatcgagggggagacctaccagtgcagggtgacccacccccacctgcccagggccct
catgcggtccacgaccaagaccagcggcccgcgtgctgccccggaagtctatgcgtttgcgacgccggagtggccggggagcc
gggacaagcgcaccctcgcctgcctgatccagaacttcatgcctgaggacatctcggtgcagtggctgcacaacgaggtgcagct
cccggacgcccggcacagcacgacgcagccccgcaagaccaagggctccggcttcttcgtcttcagccgcctggaggtgacca
gggccgaatgggagcagaaagatgagttcatctgccgtgcagtccatgaggcagcgagcccctcacagaccgtccagcgagcg
gtgtctgtaaatcccggtaaagcggatccttcgaagctcccatcctgggccattaccttaatctcagtaaatggaatttttgtgatatgct
gcctgacctactgctttgccccaagatgcagagagagaaggaggaatgagagattgagaagggaaagtgtacgccctgtataaat
cgata
AA
5B9-scFv-human IgE Fe (CH3—CH3—CH4)-CD80
mrfsaqllgllvlwipgstadivmtqaafsnpvtlgtsasiscrssksllhsngttylywylqkpgqspqlli
yqmsnlasgvpdrfsssgsgtdfilrisrveaedvgvyycaqnlelpltfgagtklelkrggggsggggsggggssqvqlkqsg
pglvqssqslsitctvsgfslttyavhwvrqspgkglewlgviwsggttdynaafisrlsitkddsksqvffkmnslqpndtaiy
ycarnggdnypyyyamdywgqgtsvtvssdhvcsrdfipptvkilqsscdggghfpptiqllclvsgytpgtinitwledgqv
mdvdlstasttqegelastqseltlsqkhwlsdrtytcqvtyqghtfedstkkcadsnprgvsaylsrpspfdlfirksptitclvvd
lapskgtvnltwsrasgkpvnhstrkeekqrngtltvtstlpvgtrdwiegctyqcrvthphlpralmrsttktsgpraapevyaf
atpewpgsrdkrtlacliqnfrnpedisvqwlhnevqlpdarhsttqjprktkgsgffvfsrlevtraeweqkdeficravheaasp
sqtvqravsvnpgkadpsklpswaitlisvngifviccltycfaprcrerrmerlrresvrpv
NT
2e12-scFv-IgAH IgA-T4-CD80
aagcttatggattttcaagtgcagattttcagcttcctgctaatcagtgcttcagtcataatgtccagaggagtcg
acattgtgctcacccaatctccagcttctttggctgtgtctctaggtcagagagccaccatctcctgcagagccagtgaaagtgttgaa
tattatgtcacaagtttaatgcagtggtaccaacagaaaccaggacagccacccaaactcctcatctctgctgcatccaacgtagaat
ctggggtccctgccaggtttagtggcagtgggtctgggacagacttcagcctcaacatccatcctgtggaggaggatgatattgcaa
tgtatttctgtcagcaaagtaggaaggttccttggacgttcggtggaggcaccaagctggaaatcaaacggggtggcggtggctcg
ggcggaggtgggtcgggtggcggcggatctcaggtgcagctgaaggagtcaggacctggcctggtggcgccctcacagagcc
tgtccatcacatgcaccgtctcagggttctcattaaccggctatggtgtaaactgggttcgccagcctccaggaaagggtctggagt
ggctgggaatgatatggggtgatggaagcacagactataattcagctctcaaatccagactgagcatcaccaaggacaactccaa
gagccaagttttcttaaaaatgaacagtctgcaaactgatgacacagccagatactactgtgccagagatggttatagtaactttcatt
actatgttatggactactggggtcaaggaacctcagtcaccgtctcctcagatcagccagttccctcaactccacctaccccatctcc
ctcaactccacctaccccatctccctcatgctgccacccccgactgtcactgcaccgaccggccctcgaggacctgctcttaggttc
agaagcgatcctcacgtgcacactgaccggcctgagagatgcctcaggtgtcaccttcacctggacgccctcaagtgggaagag
cgctgttcaaggaccacctgaccgtgacctctgtggctgctacagcgtgtccagtgtcctgccgggctgtgccgagccatggaacc
atgggaagaccttcacttgcactgctgcctaccccgagtccaagaccccgctaaccgccaccctctcaaaatccggaaacacattc
cggcccgaggtccacctgctgccgccgccgtcggaggagctggccctgaacgagctggtgacgctgacgtgcctggcacgtgg
cttcagccccaaggatgtgctggttcgctggctgcaggggtcacaggagctgccccgcgagaagtacctgacttgggcatcccgg
caggagcccagccagggcaccaccaccttcgctgtgaccagcatactgcgcgtggcagccgaggactggaagaagggggaca
ccttctcctgcatggtgggccacgaggccctgccgctggccttcacacagaagaccatcgaccgcttggcgggtaaacccaccca
tgtcaatgtgtctgttgtcatggcggaggtggacgcggatccttcgaacaacctgctcccatcctgggccattaccttaatctcagtaa
atggaatttttgtgatatgctgcctgacctactgctttgccccaagatgcagagagagaaggaggaatgagagattgagaagggaa
agtgtacgccctgtataaatcgatac
AA
2e12-scFv-IgAH IgA-T4-CD80
mdfqvqifsfllisasvirnsrgvdivltqspaslavslgqratiscrasesveyyvtslmqwyqqkpgqp
pkllisaasnvesgvparfsgsgsgtdfslnihpveeddiamyfcqqsrkvpwtfgggtkleikrggggsggggsggggsqvq
lkesgpglvapsqslsitctvsgfsltgygvnwvrqppgkglewlgmiwgdgstdynsalksrlsitkdnsksqvflknslqt
ddtaryycardgysnfhyyvmdywgqgtsvtvssdqpvpstpptpspstpptpspscchprlshrpaledlllgseailtctltg
lrdasgvtflwtpssgksavqgppdrdlcgcysvssvlpgcacpwnhgktftctaaypesktpltatlsksgntfrevhllppps
eelalneIvtltclargfspkdvlvrwIqgsqelprekyltwasrqepsqgtttfavtsilrvaaedwkkgdtfscmvghealplaf
tqktidrlagkpthvnvsvvmaevdadpsnnllpswaitlisvngifviccltycfaprcrerrrnerlrresvrpv
NT
2e12-scFv-human IgE Fc (CH3—CH3—CH4)-CD80
aagcttatggattttcaagtgcagattttcagcttcctgctaatcagtgcttcagtcataatgtccagaggagtcg
acattgtgctcacccaatctccagcttctttggctgtgtctctaggtcagagagccaccatctcctgcagagccagtgaaagtgttgaa
tattatgtcacaagtttaatgcagtggtaccaacagaaaccaggacagccacccaaactcctcatctctgctgcatccaacgtagaat
ctggggtccctgccaggtttagtggcagtgggtctgggacagacttcagcctcaacatccatcctgtggaggaggatgatattgcaa
tgtatttctgtcagcaaagtaggaaggttccttggacgttcggtggaggcaccaagctggaaatcaaacggggtggcggtggctcg
ggcggaggtgggtcgggtggcggcggatctcaggtgcagctgaaggagtcaggacctggcctggtggcgccctcacagagcc
tgtccatcacatgcaccgtctcagggttctcattaaccggctatggtgtaaactgggttcgccagcctccaggaaagggtctggagt
ggctgggaatgatatggggtgatggaagcacagactataattcagctctcaaatccagactgagcatcaccaaggacaactccaa
gagccaagttttcttaaaaatgaacagtctgcaaactgatgacacagccagatactactgtgccagagatggttatagtaactttcatt
actatgttatggactactggggtcaaggaacctcagtcaccgtctcctcagatcacgtctgctccagggacttcaccccgcccaccg
tgaagatcttacagtcgtcctgcgacggcggcgggcacttccccccgaccatccagctcctgtgcctcgtctctgggtacacccca
gggactatcaacatcacctggctggaggacgggcaggtcatggacgtggacttgtccaccgcctctaccacgcaggagggtgag
ctggcctccacacaaagcgagctcaccctcagccagaagcactggctgtcagaccgcacctacacctgccaggtcacctatcaag
gtcacacctttgaggacagcaccaagaagtgtgcagattccaacccgagaggggtgagcgcctacctaagccggcccagcccgt
tcgacctgttcatccgcaagtcgcccacgatcacctgtctggtggtggacctggcacccagcaaggggaccgtgaacctgacctg
gtcccgggccagtgggaagcctgtgaaccactccaccagaaaggaggagaagcagcgcaatggcacgttaaccgtcacgtcca
ccctgccggtgggcacccgagactggatcgagggggagacctaccagtgcagggtgacccacccccacctgcccagggccct
catgcggtccacgaccaagaccagcggcccgcgtgctgccccggaagtctatgcgtttgcgacgccggagtggccggggagcc
gggacaagcgcaccctcgcctgcctgatccagaacttcatgcctgaggacatctcggtgcagtggctgcacaacgaggtgcagct
cccggacgcccggcacagcacgacgcagccccgcaagaccaagggctccggcttcttcgtcttcagccgcctggaggtgacca
gggccgaatgggagcagaaagatgagttcatctgccgtgcagtccatgaggcagcgagcccctcacagaccgtccagcgagcg
gtgtctgtaaatcccggtaaagcggatccttcgaagctcccatcctgggccattaccttaatctcagtaaatggaatttttgtgatatgct
gcctgacctactgctttgccccaagatgcagagagagaaggaggaatgagagattgagaagggaaagtgtacgccctgtataaat
cgata
AA
2e12-scFv-human IgE Fc (CH3—CH3—CH4)-CD80
[sequence omitted]
NT
500A2 scFv
atgttgtatacatctcagctccttgggcttttactcttctggatttcagcctccagaagtgacatagtgctgactca
gactccagccactctgtctctaattcctggagaaagagtcacaatgacctgtaagaccagtcagaatattggcacaatcttacactgg
tatcaccaaaaaccaaaggaggctccaagggctctcatcaagtatgcttcgcagtccattcctgggatcccctccagattcagtggc
agtggttcggaaacagatttcactctcagcatcaataacctggagcctgatgatatcggaatttattactgtcaacaaagtagaagctg
gcctgtcacgttcggtcctggcaccaagctggagataaaacggggtggcggtggctcgggcggaggtgggtcgggtggcggcg
gatctcaggtcaagctgcagcagtccggttctgaactagggaaacctggggcctcagtgaaactgtcctgcaagacttcaggctac
atattcacagatcactatatttcttgggtgaaacagaagcctggagaaagcctgcagtggataggaaatgtttatggtggaaatggtg
gtacaagctacaatcaaaaattccagggcaaggccacactgactgtagataaaatctctagcacagcctacatggaactcagcagc
ctgacatctgaggattctgccatctattactgtgcaagaaggccggtagcgacgggccatgctatggactactggggtcaggggat
ccaagttaccgtctcctctgatc
AA
500A2 scFv
mlytsqllglllfwisasrsdivltqtpatlslipgervtmtcktsqnigtilhwyhqkpkeapralikyasqsi
pgipsrfsgsgsetdftlsinnlepddigiyycqqsrswpvtfgpgtkleikrggggsggggsggggsqvklqqsgselgkpga
svklscktsgyiftdhyiswvkqkpgesIqwignvyggnggtsynqkfqgkatltvdkisstayme1ssltsedsaiyycarrp
vatghamdywgqgiqvtvssd
5′ oligo:
Name hIgAbc15
Sequence : GTTGTTGATCAGCCAGTTCCCTCAACTCCACCTACC
3′ oligo:
Name IgA3BB
GTTGTTTTCGAAGGATCCGCGTCCACCTCCGCCATGACAACAGA
5′ oligo:
Name IgGwT3
GTTGTTTTCGAAGGATCCGCTTTACCCGGAGACAGGGAGAGGCT
CTT
3′ oligo:
Name hIgGwT5
GTTGTTAGATCTGGAGCCCAAATCTTGTGACAAAACTCACACATG
5′ oligo:
Name: FADD5
Sequence
GTTGTGGATCCTTCGAACCCGTTCCTGGTGCTGCTGCACTCGGTGTCG
3′ oligo:
Name: FADD3
Sequence
GTTGTTATCGATCTCGAGTTATCAGGACGCTTCGGAGGTAGATGCGTC
FADD-CssCFv:
Gtggatccttcgaacccgttcctggtgctgctgcactcggtgtcgtccagcctgtcgagcagcgagctgacc
gagctcaagttcctatgcctcgggcgcgtgggcaagcgcaagctggagcgcgtgcagagcggcctagacctcttctccatgctgc
tggagcagaacgacctggagcccgggcacaccgagctcctgcgcgagctgctcgcctccctgcggcgccacgacctgctgcg
gcgcgtcgacgacttcgaggcgggggcggcggccggggccgcgcctggggaagaagacctgtgtgcagcatttaacgtcatat
gtgataatgtggggaaagattggagaaggctggctcgtcagctcaaagtctcagacaccaagatcgacagcatcgaggacagata
cccccgcaacctgacagagcgtgtgcgggagtcactgagaatctggaagaacacagagaaggagaacgcaacagtggcccac
ctggtgggggctctcaggtcctgccagatgaacctggtggctgacctggtacaagaggttcagcaggcccgtgacctccagaaca
ggagtggggccatgtccccgatgtcatggaactcagacgcatctacctccgaagcgtcctgataactcgagatcgataacaac
peptide Sequence:
vdpsnpflvllhsvssslssseltelkflclgrvgkrklervqsgldlfsmlleqndlepghtellrellaslrrh
dllrrvddfcagaaagaapgccdlcaafhvicdnvgkdwrrlarqlkvsdtkidsiedrypmltervreslriwkntekenatva
hlvgalrscqmnlvadlvqevqqardlqnrsgamspmswnsdastseas
Name: HCD28tm5B
GTTGTGGATCCTCCCTTTTGGGTGCTGGTGGTGGTTGGTGTCCTG
GCTTGCTATAGCTTG
Name HCD28tm5′
GTTGTTTCGAACCCAGAAAATAATAAAGGCCACTGTTACTAGCA
AGCTATAGCAAGCCAG
HCD28tm5′
GTTGTGGATCCTCCCTTTTGGGTGCTGGTGGT
HCD28tm3′
GTTGTTTCGAACCCAGAAAATAATAAAGGCCAC
HCD80tm5′
GTTGTGGATCCTCCTGCTCCcATCCTGG
HCD80tm3′
GTTGTTTCGAACGGCAAAGCAGTAGGTCAGGC
Name MFADD5BB
Sequence
GTTGTGGATCCTTCGAACCcATTCCTGGTGCTGCTGCACTCGCTG
Name MFADD3XC
Sequence
GTTGTTATCGATCTCGAGTCAGGGTGTTTCTGAGGAAGACAC
Murine FADD Nucleotide Sequence (full length, but without flanking -Ig
or transmembrane Sequences):
Gtggatccttcgaacatggacccattcctggtgctgctgcactcgctgtccggcagcctgtcgggcaacgat
ctgatggagctcaagttcttgtgccgcgagcgcgtgagcaaacgaaagctggagcgcgtgcagagtggcctggacctgttcacg
gtgctgctggagcagaacgacctggagcgcgggcacaccgggctgctgcgcgagttgctggcctcgctgcgccgacacgatct
actgcagcgcctggacgacttcgaggcggggacggcgaccgctgcgcccccgggggaggcagatctgcaggtggcatttgac
attgtgtgtgacaatgtggggagagactggaaaagactggcccgcgagctgaaggtgtctgaggccaagatggatgggattgag
gagaagtacccccgaagtctgagtgagcgggtaagggagagtctgaaagtctggaagaatgctgagaagaagaacgcctcggt
ggccggactggtcaaggcgctgcggacctgcaggctgaatctggtggctgacctggtggaagaagcccaggaatctgtgagca
agagtgagaatatgtccccagtactaagggattcaactgtgtcttcctcagaaacaccctgactcgagatcgat
Murine FADD
vdpsnmdpflvllhslsgslsgndlmelkflcrervskrklervqsgldlftvlleqndlerghtgllrellasl
rrhdllqrlddfcagtataappgcad1qvafdivcdnvgrdwkrlarelkvseakmdgieekyprslservreslkvwknaekk
nasvaglvkalrtcrlnlvadlveeaqcsvsksenmspvlrdstvsssetp
Name : MCASP3-5
Sequence
GTTGTGGATCCTTCGAACATGGAGAACAACAAAACCTCAGTGGATTCA
Name: MCASP3-3
Sequence
GTTGTTATCGATCTCGAGCTAGTGATAAAAGTACAGTTCTTTCGT
Name: mcasp8-5
Sequence
GTTGTTTCGAACATGGATTTCCAGAGTTGTCTTTATGCTATTGCTG
Name: mcasp8-3
Sequence
GTTGTTATCGATCTCGAGTCATTAGGGAGGGAAGAAGAGCTTCTTCCG
Name: hcasp3-5
Sequence
GTTGTGGATCCTTCGAACATGGAGAACACTGAAAACTCAGTGGAT
Name: hcasp3-3
Sequence
GTTGTTATCGATCTCGAGTTAGTGATAAAAATAGAGTTCTTTTGTGAG
Name: hcasp8-5
Sequence
GTTGTGGATCCTTCGAACATGGACTTCAGCAGAAATCTTTATGAT
Name: hcasp8-3
Sequence
GTTGTTATCGATGCATGCTCAATCAGAAGGGAAGACAAGTTTTTTTCT
HuIgGMHWC
gtt gtt gat cag gag ccc aaa tct tct gac aaa act cac aca tct cca ccg tcc cca gca
cct gaa ctc ctg ggt gga ccg tca gtc ttc c
NT
2H7-human IgE (CH3—CH3—CH4)
aagcttgccgccatggattttcaagtgcagattttcagcttcctgctaatcagtgcttcagtcataattgccagag
gacaaattgttctctcccagtctccagcaatcctgtctgcatctccaggggagaaggtcacaatgacttgcagggccagctcaagtg
taagttacatgcactggtaccagcagaagccaggatcctcccccaaaccctggatttatgccccatccaacctggcttctggagtcc
ctgctcgcttcagtggcagtgggtctgggacctcttactctctcacaatcagcagagtggaggctgaagatgctgccacttattactg
ccagcagtggagttttaacccacccacgttcggtgctgggaccaagctggagctgaaaggtggcggtggctcgggcggtggtgg
atctggaggaggtgggagctctcaggcttatctacagcagtctggggctgagctggtgaggcctggggcctcagtgaagatgtcct
gcaaggcttctggctacacatttaccagttacaatatgcactgggtaaagcagacacctagacagggcctggaatggattggagct
atttatccaggaaatggtgatacttcctacaatcagaagttcaagggcaaggccacactgactgtagacaaatcctccagcacagcc
tacatgcagctcagcagcctgacatctgaagactctgcggtctatttctgtgcaagagtggtgtactatagtaactcttactggtacttc
gatgtctggggcacagggaccacggtcaccgtctctgatcacgtctgctccagggacttcaccccgcccaccgtgaagatcttaca
gtcgtcctgcgacggcggcgggcacttccccccgaccatccagctcctgtgcctcgtctctgggtacaccccagggactatcaac
atcacctggctggaggacgggcaggtcatggacgtggacttgtccaccgcctctaccacgcaggagggtgagctggcctccaca
caaagcgagctcaccctcagccagaagcactggctgtcagaccgcacctacacctgccaggtcacctatcaaggtcacacctttg
aggacagcaccaagaagtgtgcagattccaacccgagaggggtgagcgcctacctaagccggcccagcccgttcgacctgttca
tccgcaagtcgcccacgatcacctgtctggtggtggacctggcacccagcaaggggaccgtgaacctgacctggtcccgggcca
gtgggaagcctgtgaaccactccaccagaaaggaggagaagcagcgcaatggcacgttaaccgtcacgtccaccctgccggtg
ggcacccgagactggatcgagggggagacctaccagtgcagggtgacccacccccacctgcccagggccctcatgcggtcca
cgaccaagaccagcggcccgcgtgctgccccggaagtctatgcgtttgcgacgccggagtggccggggagccgggacaagcg
caccctcgcctgcctgatccagaacttcatgcctgaggacatctcggtgcagtggctgcacaacgaggtgcagctcccggacgcc
cggcacagcacgacgcagccccgcaagaccaagggctccggcttcttcgtcttcagccgcctggag~gaccagggccgaatg
ggagcagaaagatgagttcatctgccgtgcagtccatgaggcagcgagcccctcacagaccgtccagcgagcggtgtctgtaaat
cccggtaaatgataatctaga
AA
2H7 scFv IgE (CH3—CH3—CH4)
mdfqvqifsfllisasviiargqivlsqspailsaspgekvtmtcrasssvsymhwyqqkpgsspkpwiy
apsnlasgvparfsgsgsgtsysltisrveaedaatyycqqwsfnpptfgagtklelkggggsggggsggggssqaylqqsgac
lvrpgasvkmsckasgytftsynmhwvkqtprqglewigaiypgngdtsynqkfkgkatltvdkssstaymqlssltsedsa
vyfcarvvyysnsywyfdvwgtgttvtvsdhvcsrdftpptvkilqsscdggghfpptiqllclvsgytpgtinitwledgqvm
dvdlstasttqegelastqseltlsqkhwlsdrtytcqvtyqghtfedstkkcadsnprgvsaylsrpspfdlfirksptitclvvdla
pskgtvnltwsrasgkpvnhstrkeekqrngtltvtstlpvgtrdwiegctyqcrvthphlpralmrsttktsgpraapevyafat
pewpgsrdkrtlacliqnfmpedisvqwlhnevqlpdarhsttqprktkgsgffvfsrlevtraeweqkdeficravhcaasps
qtvqravsvnpgk
NT
2H7 scFv MH (SSS) MCH2WTCH3
aagcttgccgccatggattttcaagtgcagattttcagcttcctgctaatcagtgcttcagtcataattgccagag
gacaaattgttctctcccagtctccagcaatcctgtctgcatctccaggggagaaggtcacaatgacttgcagggccagctcaagtg
taagttacatgcactggtaccagcagaagccaggatcctcccccaaaccctggatttatgccccatccaacctggcttctggagtcc
ctgctcgcttcagtggcagtgggtctgggacctcttactctctcacaatcagcagagtggaggctgaagatgctgccacttattactg
ccagcagtggagttttaacccacccacgttcggtgctgggaccaagctggagctgaaagatggcggtggctcgggcggtggtgg
atctggaggaggtgggagctctcaggcttatctacagcagtctggggctgagctggtgaggcctggggcctcagtgaagatgtcct
gcaaggcttctggctacacatttaccagttacaatatgcactgggtaaagcagacacctagacagggcctggaatggattggagct
atttatccaggaaatggtgatacttcctacaatcagaagttcaagggcaaggccacactgactgtagacaaatcctccagcacagcc
tacatgcagctcagcagcctgacatctgaagactctgcggtctatttctgtgcaagagtggtgtactatagtaactcttactggtacttc
gatgtctggggcacagggaccacggtcaccgtctcttctgatcaggagcccaaatcttctgacaaaactcacacatccccaccgtc
cccagcacctgaactcctggggggatcgtcagtcttcctcttccccccaaaacccaaggacaccctcatgatctcccggacccctg
aggtcacatgcgtggtggtggacgtgagccacgaagaccctgaggtcaagttcaactggtacgtggacggcgtggaggtgcata
atgccaagacaaagccgcgggaggagcagtacaacagcacgtaccgtgtggtcagcgtcctcaccgtcctgcaccaggactgg
ctgaatggcaaggagtacaagtgcaaggtctccaacaaagccctcccagcccccatcgagaaaacaatctccaaagccaaaggg
cagccccgagaaccacaggtgtacaccctgcccccatcccgggatgagctgaccaagaaccaggtcagcctgacctgcctggtc
aaaggcttctatcccagcgacatcgccgtggagtgggagagcaatgggcagccggagaacaactacaagaccacgcctcccgt
gctggactccgacggctccttcttcctctacagcaagctcaccgtggacaagagcaggtggcagcaggggaacgtcttctcatgct
ccgtgatgcatgaggctctgcacaaccactacacgcagaagagcctctccctgtctccgggtaaatgatctaga
AA
2H7 scFv MH (SSS) MCH2WTCH3
mdfqvqifsfllisasviiargqivlsqspailsaspgekvtmtcrasssvsymhwyqqkpgsspkpwiy
apsnlasgvparfsgsgsgtsyshisrveaedaatyycqqesfnpptfgagtklelkdgggsggggsggggssqaylqqsgae
lvrpgasvkmsckasgytftsynmhwvkqtprqglewigaiypgngdtsynqkfkgkatltvdkssstaymqlssltsedsa
vyfcarvvyysnsywyfdvwgtgttvtvssdqepkssdkthtsppspapellggssvflfppkpkdtlmisrtpevtcvvvdv
shedpevkfnwyvdgvevhnaktkpreeqynstyrvvsvltvlhqdwlngkeykckvsnkalpapiektiskakgqprep
qvytlppsrdeltknqvsltclvkgfypsdiavewesngqpennykttppvldsdgsfflyskltvdksrwqqgnvfscsvmh
ealhnhytqkslslspgk
NT
5B9 scFv MTHWTCH2CH3
aagcttgccgccatgaggttctctgctcagcttctggggctgcttgtgctctggatccctggatccactgcaga
tattgtgatgacgcaggctgcattctccaatccagtcactcttggaacatcagcttccatctcctgcaggtctagtaagagtctcctaca
tagtaatggcatcacttatttgtattggtatctgcagaagccaggccagtctcctcagctcctgatttatcagatgtccaaccttgcctca
ggagtcccagacaggttcagtagcagtgggtcaggaactgatttcactgagaatcagcagagtggaggctgaggatgccta
tttattactgtgctcaaaatctagaacttccgctcacgttcggtgctgggaccaagctggagctgaaacggggtggcggtggctcgg
gcggtggtgggtcgggtggcggcggatcgtcacaggtgcagctgaagcagtcaggacctggcctagtgcagtcctcacagagc
ctgtccatcacctgcacagtctctggtttctcattaactacctatgctgtacactgggttcgccagtctccaggaaagggtctggagtg
gctgggagtgatatggagtggtggaatcacagactataatgcagctttcatatccagactgagcatcaccaaggacgattccaaga
gccaagttttctttaaaatgaacagtctgcaacctaatgacacagccatttattactgtgccagaaatgggggtgataactacccttatt
actatgctatggactactggggtcaaggaacctcagtcaccgtctcctctgatcaggagcccaaatcttctgacaaaactcacacatc
cccaccgtccccagcacctgaactcctggggggaccgtcagtcttcctcttccccccaaaacccaaggacaccctcatgatctccc
ggacccctgaggtcacatgcgtggtggtggacgtgagccacgaagaccctgaggtcaagttcaactggtacgtggacggcgtgg
aggtgcataatgccaagacaaagccgcgggaggagcagtacaacagcacgtaccgtgtggtcagcgtcctcaccgtcctgcacc
aggactggctgaatggcaaggagtacaagtgcaaggtctccaacaaagccctcccagcccccatcgagaaaacaatctccaaag
ccaaagggcagccccgagaaccacaggtgtacaccctgcccccatcccgggatgagctgaccaagaaccaggtcagcctgacc
tgcctggtcaaaggcttctatcccagcgacatcgccgtggagtgggagagcaatgggcagccggagaacaactacaagaccac
gcctcccgtgctggactccgacggctccttcttcctctacagcaagctcaccgtggacaagagcaggtggcagcaggggaacgtc
ttctcatgctccgtgatgcatgaggctctgcacaaccactacacgcagaagagcctctccctgtctccgggtaaatgatctaga
AA
5B9 scFv MTHWTCH2CH3
mrfsaqllgllvlwipgstadivmtqaafsnpvtlgtsasiscrssksllhsngttylywylqkpgqspqlli
yqmsnlasgvpdrfsssgsgtdftlrisrveaedvgvyycaqnlelpltfgagtklelkggggsggggsggggssqvqlkqsg
pglvqssqslsitctvsgfslttyavhwvrqspgkglewlgviwsggitdynaafisrlsitkddsksqvffkmnslqpndtaiy
ycarnggdnypyyyamdywgqgtsvtvssdqepkssdkthtsppspapellggpsvflfppkpkdtlmisrtpevtcvvvd
vshedpevkfnwyvdgvevhnaktkpreeqynstyrvvsvltvlhqdwlngkeykckvsnkalpapiektiskakgqpre
pqvytlppsrdeltknqvsltclvkgfypsdiavewesngqpennykttppvldsdgsfayskltvdksrwqqgnvfscsvm
healhnhytqkslslspgk

What is claimed is:

1. A binding domain-immunoglobulin fusion protein, comprising:
(a) a binding domain polypeptide that is fused to an immunoglobulin hinge region polypeptide, wherein said hinge region polypeptide is selected from the group consisting of (i) a wild-type human IgG1 immunoglobulin hinge region polypeptide, (ii) a mutated human IgG1 immunoglobulin hinge region polypeptide that is derived from a wild-type immunoglobulin hinge region polypeptide having three or more cysteine residues, wherein said mutated human IgG1 immunoglobulin hinge region polypeptide contains two cysteine residues and wherein a first cysteine of the wild-type hinge region is not mutated, (iii) a mutated human IgG1 immunoglobulin hinge region polypeptide that is derived from a wild-type immunoglobulin hinge region polypeptide having three or more cysteine residues, wherein said mutated human IgG1 immunoglobulin hinge region polypeptide contains no more than one cysteine residue, and (iv) a mutated human IgG1 immunoglobulin hinge region polypeptide that is derived from a wild-type immunoglobulin hinge region polypeptide having three or more cysteine residues, wherein said mutated human IgG1 immunoglobulin hinge region polypeptide contains no cysteine residues;
(b) an immunoglobulin heavy chain CH2 constant region polypeptide that is fused to the hinge region polypeptide; and
(c) an immunoglobulin heavy chain CH3 constant region polypeptide that is fused to the CH2 constant region polypeptide,
wherein:
(1) the binding domain-immunoglobulin fusion protein is capable of at least one immunological activity selected from the group consisting of antibody dependent cell-mediated cytotoxicity and complement fixation, and
(2) the binding domain polypeptide is capable of specifically binding to an antigen.

2. The binding domain-immunoglobulin fusion protein of claim 1 wherein the immunoglobulin hinge region polypeptide is a mutated hinge region polypeptide and exhibits a reduced ability to dimerize, relative to a wild-type human immunoglobulin G hinge region polypeptide.

3. The binding domain-immunoglobulin fusion protein of claim 1 wherein the binding domain polypeptide comprises at least one immunoglobulin variable region polypeptide that is selected from the group consisting of an immunoglobulin light chain variable region polypeptide and an immunoglobulin heavy chain variable region polypeptide.

4. A binding domain-immunoglobulin fusion protein according to claim 3 which comprises an immunoglobulin heavy chain variable region polypeptide, wherein said heavy chain variable region polypeptide is a human immunoglobulin heavy chain variable region polypeptide comprising a mutation at an amino acid at a location corresponding to amino acid position 11 in SEQ ID NO:______.

5. A binding domain-immunoglobulin fusion protein according to claim 3 which comprises a polypeptide having a sequence selected from the group consisting of SEQ ID NO:______ and SEQ ID NO:______.

6. The binding domain-immunoglobulin fusion protein of claim 3 wherein the immunoglobulin variable region polypeptide is derived from a human immunoglobulin.

7. The binding domain-immunoglobulin fusion protein of claim 3 wherein the immunoglobulin variable region polypeptide comprises a humanized immunoglobulin polypeptide sequence.

8. The binding domain-immunoglobulin fusion protein of claim 3 wherein the immunoglobulin variable region polypeptide is derived from a murine immunoglobulin.

9. The binding domain-immunoglobulin fusion protein of claim 1 wherein the binding domain polypeptide comprises:
(a) at least one immunoglobulin light chain variable region polypeptide;
(b) at least one immunoglobulin heavy chain variable region polypeptide; and
(c) at least one linker polypeptide that is fused to the polypeptide of (a) and to the polypeptide of (b).

10. The binding domain-immunoglobulin fusion protein of claim 9 wherein the immunoglobulin light chain variable region and heavy chain variable region polypeptides are derived from human immunoglobulins.

11. The binding domain-immunoglobulin fusion protein of claim 9 wherein the linker polypeptide comprises at least one polypeptide having as an amino acid sequence Gly-Gly-Gly-Gly-Ser [SEQ ID NO:______].

12. The binding domain-immunoglobulin fusion protein of claim 9 wherein the linker polypeptide comprises at least three repeats of a polypeptide having as an amino acid sequence Gly-Gly-Gly-Gly-Ser [SEQ ID NO:______].

13. A binding domain-immunoglobulin fusion protein according to claim 9 wherein the linker comprises a glycosylation site.

14. The fusion protein of claim 13 wherein the glycosylation site is selected from the group consisting of an asparagine-linked glycosylation site, an O-linked glycosylation site, a C-mannosylation site, a glypiation site and a phosphoglycation site.

15. The binding domain-immunoglobulin fusion protein of claim 1 wherein at least one of the immunoglobulin heavy chain CH2 constant region polypeptide and the immunoglobulin heavy chain CH3 constant region polypeptide is derived from a human immunoglobulin heavy chain.

16. The binding domain-immunoglobulin fusion protein of claim 1 wherein the immunoglobulin heavy chain constant region CH2 and CH3 polypeptides are of an isotype selected from the group consisting of human IgG and human IgA.

17. The binding domain-immunoglobulin fusion protein of claim 1 wherein the antigen is selected from the group consisting of CD19, CD20, CD22, CD37, CD40, L6, CD2, CD28, CD30, CD40, CD50 (ICAM3), CD54 (ICAM1), CD80, CD86, B7-H1, CD134 (OX40), CD137 (41BB), CD152 (CTLA-4), CD153 (CD30 ligand), CD154 (CD40 ligand), ICOS, CD19, CD3, CD4, CD25, CD8, CD11b, CD14, CD25, CD56 and CD69.

18. The binding domain-immunoglobulin fusion protein of claim 1 wherein the binding domain polypeptide comprises a CD154 extracellular domain.

19. The binding domain-immunoglobulin fusion protein of claim 1 wherein the binding domain polypeptide comprises a CD154 extracellular domain and at least one immunoglobulin variable region polypeptide.

20. The binding domain-immunoglobulin fusion protein of claim 1 wherein the binding domain polypeptide comprises a CTLA-4 extracellular domain.

21. The binding domain-immunoglobulin fusion protein of claim 20 wherein at least one of the immunoglobulin heavy chain constant region polypeptides selected from the group consisting of a CH2 constant region polypeptide and a CH3 constant region polypeptide is a human IgG1 constant region polypeptide.

22. The binding domain-immunoglobulin fusion protein of claim 20 wherein at least one of the immunoglobulin heavy chain constant region polypeptides selected from the group consisting of a CH2 constant region polypeptide and a CH3 constant region polypeptide is a human IgA constant region polypeptide.

23. A binding domain-immunoglobulin fusion protein, comprising:
(a) a binding domain polypeptide that is fused to an immunoglobulin hinge region polypeptide;
(b) an immunoglobulin heavy chain CH2 constant region polypeptide that is fused to the hinge region polypeptide; and
(c) an immunoglobulin heavy chain CH3 constant region polypeptide that is fused to the CH2 constant region polypeptide,
wherein:
(1) the binding domain polypeptide comprises a CTLA-4 extracellular domain that is capable of specifically binding to at least one CTLA-4 ligand selected from the group consisting of CD80 and CD86,
(2) the immunoglobulin hinge region polypeptide comprises a polypeptide that is selected from the group consisting of a human IgA hinge region polypeptide and a human IgG1 hinge region polypeptide,
(3) the immunoglobulin heavy chain CH2 constant region polypeptide comprises a polypeptide that is selected from the group consisting of a human IgA heavy chain CH2 constant region polypeptide and a human IgG1 heavy chain CH2 constant region polypeptide,
(4) the immunoglobulin heavy chain CH3 constant region polypeptide comprises a polypeptide that is selected from the group consisting of a human IgA heavy chain CH3 constant region polypeptide and a human IgG1 heavy chain CH3 constant region polypeptide, and
(5) the binding domain-immunoglobulin fusion protein is capable of at least one immunological activity selected from the group consisting of antibody dependent cell-mediated cytotoxicity and complement fixation.

24. A binding domain-immunoglobulin fusion protein, comprising:
(a) a binding domain polypeptide that is fused to an immunoglobulin hinge region polypeptide, wherein said hinge region polypeptide comprises a human IgE hinge region polypeptide;
(b) an immunoglobulin heavy chain CH2 constant region polypeptide that is fused to the hinge region polypeptide, wherein said CH2 constant region polypeptide comprises a human IgE CH2 constant region polypeptide; and
(c) an immunoglobulin heavy chain CH3 constant region polypeptide that is fused to the CH2 constant region polypeptide, wherein said CH3 constant region polypeptide comprises a human IgE CH3 constant region polypeptide
wherein:
(1) the binding domain-immunoglobulin fusion protein is capable of at least one immunological activity selected from the group consisting of antibody dependent cell-mediated cytotoxicity and induction of an allergic response mechanism, and
(2) the binding domain polypeptide is capable of specifically binding to an antigen.

25. A binding domain-immunoglobulin fusion protein according to claim 24 that comprises a human IgE CH4 constant region polypeptide.

26. The binding domain-immunoglobulin fusion protein of claim 24 wherein the antigen is a tumor antigen.

27. A binding domain-immunoglobulin fusion protein, comprising:
(a) a binding domain polypeptide that is fused to an immunoglobulin hinge region polypeptide, wherein the binding domain polypeptide is capable of specifically binding to at least one antigen that is present on an immune effector cell and wherein the hinge region polypeptide comprises a polypeptide selected from the group consisting of a human IgA hinge region polypeptide, a human IgG hinge region polypeptide, and a human IgE hinge region polypeptide;
(b) an immunoglobulin heavy chain CH2 constant region polypeptide that is fused to the hinge region polypeptide, wherein said CH2 constant region polypeptide comprises a polypeptide selected from the group consisting of a human IgA CH2 constant region polypeptide, a human IgG CH2 constant region polypeptide, and a human IgE CH2 constant region polypeptide;
(c) an immunoglobulin heavy chain CH3 constant region polypeptide that is fused to the CH2 constant region polypeptide, wherein said CH3 constant region polypeptide comprises a polypeptide selected from the group consisting of a human IgA CH3 constant region polypeptide, a human IgG CH3 constant region polypeptide, and a human IgE CH3 constant region polypeptide; and
(d) a plasma membrane anchor domain polypeptide.

28. The binding domain-immunoglobulin fusion protein of claim 27 wherein the membrane anchor domain polypeptide comprises a transmembrane domain polypeptide.

29. The binding domain-immunoglobulin fusion protein of claim 27 wherein the membrane anchor domain polypeptide comprises a transmembrane domain polypeptide and a cytoplasmic tail polypeptide.

30. The binding domain-immunoglobulin fusion protein of claim 29 wherein the cytoplasmic tail polypeptide comprises an apoptosis signaling polypeptide sequence.

31. The binding domain-immunoglobulin fusion protein of claim 30 wherein the apoptosis signaling polypeptide sequence is derived from a receptor death domain polypeptide.

32. The binding domain-immunoglobulin fusion protein of claim 31 wherein the death domain polypeptide comprises a polypeptide selected from the group consisting of an ITIM domain, an ITAM domain, FADD, TRADD, RAIDD, CD95 (FAS/Apo-1), TNFR1 and DR5.

33. The binding domain-immunoglobulin fusion protein of claim 30 wherein the apoptosis signaling polypeptide sequence comprises a polypeptide sequence derived from a caspase polypeptide that is selected from the group consisting of caspase-3 and caspase-8.

34. The binding domain-immunoglobulin fusion protein of claim 27 wherein the plasma membrane anchor domain polypeptide comprises a glycosyl-phosphatidylinositol-linkage polypeptide sequence.

35. The binding domain-immunoglobulin fusion protein of claim 27 wherein the antigen that is present on an immune effector cell is selected from the group consisting of CD2, CD28, CD30, CD40, CD50 (ICAM3), CD54 (ICAM1), CD80, CD86, B7-H1, CD134 (OX40), CD137 (41BB), CD152 (CTLA-4), CD153 (CD30 ligand), CD154 (CD40 ligand), ICOS, CD19, CD20, CD22, CD37, L6, CD3, CD4, CD25, CD8, CD11b, CD14, CD25, CD56 and CD69.

36. The binding domain-immunoglobulin fusion protein of claim 27 wherein the human IgG is human IgG1.

37. A binding domain-immunoglobulin fusion protein, comprising:
(a) a binding domain polypeptide that is fused to an immunoglobulin hinge region polypeptide, wherein the binding domain polypeptide is capable of specifically binding to at least one antigen that is present on a cancer cell surface and wherein the hinge region polypeptide comprises a polypeptide selected from the group consisting of a human IgA hinge region polypeptide, a human IgG hinge region polypeptide, and a human IgE hinge region polypeptide;
(b) an immunoglobulin heavy chain CH2 constant region polypeptide that is fused to the hinge region polypeptide, wherein said CH2 constant region polypeptide comprises a polypeptide selected from the group consisting of a human IgA CH2 constant region polypeptide, a human IgG CH2 constant region polypeptide, and a human IgE CH2 constant region polypeptide;
(c) an immunoglobulin heavy chain CH3 constant region polypeptide that is fused to the CH2 constant region polypeptide, wherein said CH3 constant region polypeptide comprises a polypeptide selected from the group consisting of a human IgA CH3 constant region polypeptide, a human IgG CH3 constant region polypeptide, and a human IgE CH3 constant region polypeptide; and
(d) a plasma membrane anchor domain polypeptide.

38. The binding domain-immunoglobulin fusion protein of claim 37 wherein the membrane anchor domain polypeptide comprises a transmembrane domain polypeptide.

39. The binding domain-immunoglobulin fusion protein of claim 37 wherein the membrane anchor domain polypeptide comprises a transmembrane domain polypeptide and a cytoplasmic tail polypeptide.

40. The binding domain-immunoglobulin fusion protein of claim 37 wherein the membrane anchor domain polypeptide comprises a glycosyl-phosphatidylinositol-linkage polypeptide sequence.

41. The binding domain-immunoglobulin fusion protein of claim 37 wherein the human IgG is human IgG1.

42. A binding domain-immunoglobulin fusion protein, comprising:
(a) a binding domain polypeptide that is fused to an immunoglobulin hinge region polypeptide, wherein said hinge region polypeptide comprises a wild-type human IgA hinge region polypeptide;
(b) an immunoglobulin heavy chain CH2 constant region polypeptide that is fused to the hinge region polypeptide, wherein said CH2 constant region polypeptide comprises a human IgA CH2 constant region polypeptide; and
(c) an immunoglobulin heavy chain CH3 constant region polypeptide that is fused to the CH2 constant region polypeptide, wherein said CH3 constant region polypeptide comprises a polypeptide selected from the group consisting of (i) a wild-type human IgA CH3 constant region polypeptide and (ii) a mutated human IgA CH3 constant region polypeptide that is incapable of associating with a J chain,
wherein:
(1) the binding domain-immunoglobulin fusion protein is capable of at least one immunological activity selected from the group consisting of antibody dependent cell-mediated cytotoxicity and complement fixation, and
(2) the binding domain polypeptide is capable of specifically binding to an antigen.

43. The binding domain-immunoglobulin fusion protein of claim 42 wherein the mutated human IgA CH3 constant region polypeptide that is incapable of associating with a J chain is selected from the group consisting of (i) a polypeptide comprising an amino acid sequence as set forth in SEQ ID NO:______ and (ii) a polypeptide comprising an amino acid sequence as set forth in SEQ ID NO:______.

44. A binding domain-immunoglobulin fusion protein, comprising:
(a) a binding domain polypeptide that is fused to an immunoglobulin hinge region polypeptide;
(b) an immunoglobulin heavy chain CH2 constant region polypeptide that is fused to the hinge region polypeptide, wherein said CH2 constant region polypeptide comprises a llama CH2 constant region polypeptide that is selected from the group consisting of a llama IgG1 CH2 constant region polypeptide, a llama IgG2 CH2 constant region polypeptide and a llama IgG3 CH2 constant region polypeptide; and
(c) an immunoglobulin heavy chain CH3 constant region polypeptide that is fused to the CH2 constant region polypeptide, wherein said CH3 constant region polypeptide comprises a llama CH3 constant region polypeptide that is selected from the group consisting of a llama IgG1 CH3 constant region polypeptide, a llama IgG2 CH3 constant region polypeptide and a llama IgG3 CH3 constant region polypeptide
wherein:
(1) the binding domain-immunoglobulin fusion protein is capable of at least one immunological activity selected from the group consisting of antibody dependent cell-mediated cytotoxicity and induction fixation of complement, and
(2) the binding domain polypeptide is capable of specifically binding to an antigen.

45. A binding domain-immunoglobulin fusion protein according to claim 44 wherein the immunoglobulin hinge region polypeptide, the llama CH2 constant region polypeptide and the llama CH3 constant region polypeptide comprise sequences derived from a llama IgG1 polypeptide and wherein the fusion protein does not include a llama IgG1 CH1 domain.

46. A binding domain-immunoglobulin fusion protein according to any one of claims 1, 23, 24, 27, 37, 42 or 44 wherein the hinge region polypeptide is mutated to contain a glycosylation site.

47. The fusion protein of claim 46 wherein the glycosylation site is selected from the group consisting of an asparagine-linked glycosylation site, an O-linked glycosylation site, a C-mannosylation site, a glypiation site and a phosphoglycation site.

48. A binding domain-immunoglobulin fusion protein according to any one of claims 1, 23, 24, 27, 37, 42 or 44 wherein the binding domain polypeptide comprises two or more binding domain polypeptide sequences wherein each of said binding domain polypeptide sequences is capable of specifically binding to an antigen.

49. A binding domain-immunoglobulin fusion protein, comprising:
(a) a binding domain polypeptide that is fused to an immunoglobulin hinge region polypeptide, wherein the hinge region polypeptide comprises an alternative hinge region polypeptide sequence;
(b) an immunoglobulin heavy chain CH2 constant region polypeptide that is fused to the hinge region polypeptide; and
(c) an immunoglobulin heavy chain CH3 constant region polypeptide that is fused to the CH2 constant region polypeptide,
wherein:
(1) the binding domain-immunoglobulin fusion protein is capable of at least one immunological activity selected from the group consisting of antibody dependent cell-mediated cytotoxicity and complement fixation, and
(2) the binding domain polypeptide is capable of specifically binding to an antigen.

50. A binding domain-immunoglobulin fusion protein, comprising:
(a) a binding domain polypeptide that is fused to an immunoglobulin hinge region polypeptide, wherein the binding domain polypeptide is capable of specifically binding to at least one antigen that is present on a cancer cell surface and wherein the hinge region polypeptide comprises an alternative hinge region polypeptide sequence;
(b) an immunoglobulin heavy chain CH2 constant region polypeptide that is fused to the hinge region polypeptide, wherein said CH2 constant region polypeptide comprises a polypeptide selected from the group consisting of a human IgA CH2 constant region polypeptide, a human IgG CH2 constant region polypeptide, and a human IgE CH2 constant region polypeptide;
(c) an immunoglobulin heavy chain CH3 constant region polypeptide that is fused to the CH2 constant region polypeptide, wherein said CH3 constant region polypeptide comprises a polypeptide selected from the group consisting of a human IgA CH3 constant region polypeptide, a human IgG CH3 constant region polypeptide, and a human IgE CH3 constant region polypeptide; and
(d) a plasma membrane anchor domain polypeptide.

51. A binding domain-immunoglobulin fusion protein according to either claim 49 or claim 50 wherein the alternative hinge region polypeptide sequence comprises a polypeptide sequence of at least ten continuous amino acids that are present in a sequence selected from the group consisting of SEQ ID NOS:___-___.

52. An isolated polynucleotide encoding a binding domain-immunoglobulin fusion protein according to any one of claims 1, 23, 24, 27, 37, 42, 44, 49 and 50.

53. A recombinant expression construct comprising a polynucleotide according to claim 52 that is operably linked to a promoter.

54. A host cell transformed or transfected with a recombinant expression construct according to claim 53.

55. A method of producing a binding domain-immunoglobulin fusion protein, comprising the steps of:
(a) culturing a host cell according to claim 54 under conditions that permit expression of the binding domain-immunoglobulin fusion protein; and
(b) isolating the binding domain-immunoglobulin fusion protein from the host cell culture.

56. A pharmaceutical composition comprising a binding domain-immunoglobulin fusion protein according to any one of claims 1, 23, 24, 42, 44, 49 or 50 in combination with a physiologically acceptable carrier.

57. A pharmaceutical composition comprising an isolated polynucleotide encoding a binding domain-immunoglobulin fusion protein according to any one of claims 1, 23, 24, 27, 37, 42, 44, 49 and 50 in combination with a physiologically acceptable carrier.

58. A method of treating a subject having or suspected of having a malignant condition or a B-cell disorder, comprising administering to a patient a therapeutically effective amount of a pharmaceutical composition selected from the group consisting of the pharmaceutical composition of claim 56 and the pharmaceutical composition of claim 57.

59. The method of claim 58 wherein the malignant condition or B-cell disorder is selected from the group consisting of a B-cell lymphoma and a disease characterized by autoantibody production.

60. The method of claim 58 wherein the malignant condition or B-cell disorder is selected from the group consisting of rheumatoid arthritis, myasthenia gravis, Grave's disease, type I diabetes mellitus, multiple sclerosis and an autoimmune disease.

61. The method of claim 58 wherein the malignant condition is selected from the group consisting of melanoma, carcinoma and sarcoma.

The application's sequence listing, which the Patent Office published only in electronic form, follows.

SEQUENCE LISTING (426 sequences)

SEQ ID NO: 1 - DNA, 812 bp, Artificial Sequence
  SYNTHETIC MOUSE SCFV FUSION GENE
  sig_peptide (13)..(78)
  V_region (79)..(396): light chain variable region for anti-CD20 scFv
  misc_feature (397)..(444): asp-gly3ser(gly4ser)2-ser peptide linker
  V_region (445)..(808): heavy chain variable region for anti-CD20 scFv
aagcttgccgccatggattttcaagtgcagattttcagcttcctgctaatcagtgcttcagtcataattgccagaggacaaattgttctctcccagtctccagcaatcctgtctgcatctccaggggagaaggtcacaatgacttgcagggccagctcaagtgtaagttacatgcactggtaccagcagaagccaggatcctcccccaaaccctggatttatgccccatccaacctggcttctggagtccctgctcgcttcagtggcagtgggtctgggacctcttactctctcacaatcagcagagtggaggctgaagatgctgccacttattactgccagcagtggagttttaacccacccacgttcggtgctgggaccaagctggagctgaaaggtggcggtggctcgggcggtggtggatctggaggaggtgggagctctcaggcttatctacagcagtctggggctgagctggtgaggcctggggcctcagtgaagatgtcctgcaaggcttctggctacacatttaccagttacaatatgcactgggtaaagcagacacctagacagggcctggaatggattggagctatttatccaggaaatggtgatacttcctacaatcagaagttcaagggcaaggccacactgactgtagacaaatcctccagcacagcctacatgcagctcagcagcctgacatctgaagactctgcggtctatttctgtgcaagagtggtgtactatagtaactcttactggtacttcgatgtctggggcacagggaccacggtcaccgtctctgatca

SEQ ID NO: 2 - DNA, 1518 bp, Artificial Sequence
  SYNTHETIC MOUSE HUMAN CHIMERIC FUSION GENE
  misc_feature (13)..(807): MURINE ANTI-HUMAN CD20 scFv
  C_region (808)..(1513): HUMAN IgG1 Fc TAIL, WILD TYPE HINGE, CH2 AND CH3
aagcttgccgccatggattttcaagtgcagattttcagcttcctgctaatcagtgcttcagtcataattgccagaggacaaattgttctctcccagtctccagcaatcctgtctgcatctccaggggagaaggtcacaatgacttgcagggccagctcaagtgtaagttacatgcactggtaccagcagaagccaggatcctcccccaaaccctggatttatgccccatccaacctggcttctggagtccctgctcgcttcagtggcagtgggtctgggacctcttactctctcacaatcagcagagtggaggctgaagatgctgccacttattactgccagcagtggagttttaacccacccacgttcggtgctgggaccaagctggagctgaaagatggcggtggctcgggcggtggtggatctggaggaggtgggagctctcaggcttatctacagcagtctggggctgagctggtgaggcctggggcctcagtgaagatgtcctgcaaggcttctggctacacatttaccagttacaatatgcactgggtaaagcagacacctagacagggcctggaatggattggagctatttatccaggaaatggtgatacttcctacaatcagaagttcaagggcaaggccacactgactgtagacaaatcctccagcacagcctacatgcagctcagcagcctgacatctgaagactctgcggtctatttctgtgcaagagtggtgtactatagtaactcttactggtacttcgatgtctggggcacagggaccacggtcaccgtctctgatcaggagcccaaatcttgtgacaaaactcacacatgcccaccgtgcccagcacctgaactcctggggggaccgtcagtcttcctcttccccccaaaacccaaggacaccctcatgatctcccggacccctgaggtcacatgcgtggtggtggacgtgagccacgaagaccctgaggtcaagttcaactggtacgtggacggcgtggaggtgcataatgccaagacaaagccgcgggaggagcagtacaacagcacgtaccgtgtggtcagcgtcctcaccgtcctgcaccaggactggctgaatggcaaggagtacaagtgcaaggtctccaacaaagccctcccagcccccatcgagaaaacaatctccaaagccaaagggcagccccgagaaccacaggtgtacaccctgcccccatcccgggatgagctgaccaagaaccaggtcagcctgacctgcctggtcaaaggcttctatcccagcgacatcgccgtggagtgggagagcaatgggcagccggagaacaactacaagaccacgcctcccgtgctggactccgacggctccttcttcctctacagcaagctcaccgtggacaagagcaggtggcagcaggggaacgtcttctcatgctccgtgatgcatgaggctctgcacaaccactacacgcagaagagcctctccctgtctccgggtaaatgatctaga

SEQ ID NO: 3 - DNA, 1518 bp, Artificial Sequence
  SYNTHETIC MOUSE-HUMAN CHIMERIC FUSION GENE
  misc_feature (13)..(807)<223>  MOUSE ANTI-HUMAN CD20 SCFV
  C_region (808)..(1513): HINGE CYSTEINES (826-829; 844-847; 853-856) MUTATED TO SERINES PROLINE TO SERINE MUTATION (880-883) IN CH2 DISRUPTS EFFECTOR FUN CTION
aagcttgccgccatggattttcaagtgcagattttcagcttcctgctaatcagtgcttcagtcataattgccagaggacaaattgttctctcccagtctccagcaatcctgtctgcatctccaggggagaaggtcacaatgacttgcagggccagctcaagtgtaagttacatgcactggtaccagcagaagccaggatcctcccccaaaccctggatttatgccccatccaacctggcttctggagtccctgctcgcttcagtggcagtgggtctgggacctcttactctctcacaatcagcagagtggaggctgaagatgctgccacttattactgccagcagtggagttttaacccacccacgttcggtgctgggaccaagctggagctgaaagatggcggtggctcgggcggtggtggatctggaggaggtgggagctctcaggcttatctacagcagtctggggctgagctggtgaggcctggggcctcagtgaagatgtcctgcaaggcttctggctacacatttaccagttacaatatgcactgggtaaagcagacacctagacagggcctggaatggattggagctatttatccaggaaatggtgatacttcctacaatcagaagttcaagggcaaggccacactgactgtagacaaatcctccagcacagcctacatgcagctcagcagcctgacatctgaagactctgcggtctatttctgtgcaagagtggtgtactatagtaactcttactggtacttcgatgtctggggcacagggaccacggtcaccgtctctgatcaggagcccaaatcttctgacaaaactcacacatccccaccgtccccagcacctgaactcctggggggatcgtcagtcttcctcttccccccaaaacccaaggacaccctcatgatctcccggacccctgaggtcacatgcgtggtggtggacgtgagccacgaagaccctgaggtcaagttcaactggtacgtggacggcgtggaggtgcataatgccaagacaaagccgcgggaggagcagtacaacagcacgtaccgtgtggtcagcgtcctcaccgtcctgcaccaggactggctgaatggcaaggagtacaagtgcaaggtctccaacaaagccctcccagcccccatcgagaaaacaatctccaaagccaaagggcagccccgagaaccacaggtgtacaccctgcccccatcccgggatgagctgaccaagaaccaggtcagcctgacctgcctggtcaaaggcttctatcccagcgacatcgccgtggagtgggagagcaatgggcagccggagaacaactacaagaccacgcctcccgtgctggactccgacggctccttcttcctctacagcaagctcaccgtggacaagagcaggtggcagcaggggaacgtcttctcatgctccgtgatgcatgaggctctgcacaaccactacacgcagaagagcctctccctgtctccgggtaaatgatctaga

SEQ ID NO: 4 - DNA, 1518 bp, Artificial Sequence
  SYNTHETIC MOUSE-HUMAN CHIMERIC FUSION GENE
  misc_feature (13)..(807): MOUSE ANTI-HUMAN CD20 SCFV
  C_region (808)..(1513): HINGE CYSTEINES MUTATED TO SERINES (826-829; 844-847; 853-856) WILD TYPE CH2 AND CH3 DOMAINS MEDIATE EFFECTOR FUNCTIONS
aagcttgccgccatggattttcaagtgcagattttcagcttcctgctaatcagtgcttcagtcataattgccagaggacaaattgttctctcccagtctccagcaatcctgtctgcatctccaggggagaaggtcacaatgacttgcagggccagctcaagtgtaagttacatgcactggtaccagcagaagccaggatcctcccccaaaccctggatttatgccccatccaacctggcttctggagtccctgctcgcttcagtggcagtgggtctgggacctcttactctctcacaatcagcagagtggaggctgaagatgctgccacttattactgccagcagtggagttttaacccacccacgttcggtgctgggaccaagctggagctgaaagatggcggtggctcgggcggtggtggatctggaggaggtgggagctctcaggcttatctacagcagtctggggctgagctggtgaggcctggggcctcagtgaagatgtcctgcaaggcttctggctacacatttaccagttacaatatgcactgggtaaagcagacacctagacagggcctggaatggattggagctatttatccaggaaatggtgatacttcctacaatcagaagttcaagggcaaggccacactgactgtagacaaatcctccagcacagcctacatgcagctcagcagcctgacatctgaagactctgcggtctatttctgtgcaagagtggtgtactatagtaactcttactggtacttcgatgtctggggcacagggaccacggtcaccgtctctgatcaggagcccaaatcttctgacaaaactcacacatccccaccgtccccagcacctgaactcctggggggaccgtcagtcttcctcttccccccaaaacccaaggacaccctcatgatctcccggacccctgaggtcacatgcgtggtggtggacgtgagccacgaagaccctgaggtcaagttcaactggtacgtggacggcgtggaggtgcataatgccaagacaaagccgcgggaggagcagtacaacagcacgtaccgtgtggtcagcgtcctcaccgtcctgcaccaggactggctgaatggcaaggagtacaagtgcaaggtctccaacaaagccctcccagcccccatcgagaaaacaatctccaaagccaaagggcagccccgagaaccacaggtgtacaccctgcccccatcccgggatgagctgaccaagaaccaggtcagcctgacctgcctggtcaaaggcttctatcccagcgacatcgccgtggagtgggagagcaatgggcagccggagaacaactacaagaccacgcctcccgtgctggactccgacggctccttcttcctctacagcaagctcaccgtggacaagagcaggtggcagcaggggaacgtcttctcatgctccgtgatgcatgaggctctgcacaaccactacacgcagaagagcctctccctgtctccgggtaaatgatctaga

SEQ ID NO: 5 - DNA, 1524 bp, Artificial Sequence
  SYNTHETIC MOUSE HUMAN CHIMERIC FUSION GENE
  misc_feature (1)..(796): MOUSE ANTI HUMAN CD20 SCFV
  N_region (797)..(864): HUMAN IGA HINGE REGION
  C_region (865)..(1518): HUMAN IGG1 CH2 AND CH3 WILD TYPE FC DOMAIN
atggattttcaagtgcagattttcagcttcctgctaatcagtgcttcagtcataattgccagaggacaaattgttctctcccagtctccagcaatcctgtctgcatctccaggggagaaggtcacaatgacttgcagggccagctcaagtgtaagttacatgcactggtaccagcagaagccaggatcctcccccaaaccctggatttatgccccatccaacctggcttctggagtccctgctcgcttcagtggcagtgggtctgggacctcttactctctcacaatcagcagagtggaggctgaagatgctgccacttattactgccagcagtggagttttaacccacccacgttcggtgctgggaccaagctggagctgaaagatggcggtggctcgggcggtggtggatctggaggaggtgggagctctcaggcttatctacagcagtctggggctgagctggtgaggcctggggcctcagtgaagatgtcctgcaaggcttctggctacacatttaccagttacaatatgcactgggtaaagcagacacctagacagggcctggaatggattggagctatttatccaggaaatggtgatacttcctacaatcagaagttcaagggcaaggccacactgactgtagacaaatcctccagcacagcctacatgcagctcagcagcctgacatctgaagactctgcggtctatttctgtgcaagagtggtgtactatagtaactcttactggtacttcgatgtctggggcacagggaccacggtcaccgtctctgatcagccagttccctcaactccacctaccccatctccctcaactccacctaccccatctccctcatgcgcacctgaactcctggggggaccgtcagtcttcctcttccccccaaaacccaaggacaccctcatgatctcccggacccctgaggtcacatgcgtggtggtggacgtgagccacgaagaccctgaggtcaagttcaactggtacgtggacggcgtggaggtgcataatgccaagacaaagccgcgggaggagcagtacaacagcacgtaccgtgtggtcagcgtcctcaccgtcctgcaccaggactggctgaatggcaaggagtacaagtgcaaggtctccaacaaagccctcccagcccccatcgagaaaacaatctccaaagccaaagggcagccccgagaaccacaggtgtacaccctgcccccatcccgggatgagctgaccaagaaccaggtcagcctgacctgcctggtcaaaggcttctatcccagcgacatcgccgtggagtgggagagcaatgggcagccggagaacaactacaagaccacgcctcccgtgctggactccgacggctccttcttcctctacagcaagctcaccgtggacaagagcaggtggcagcaggggaacgtcttctcatgctccgtgatgcatgaggctctgcacaaccactacacgcagaagagcctctccctgtctccgggtaaatgatctaga

SEQ ID NO: 6 - DNA, 711 bp, Artificial Sequence
  SYNTHETIC HUMAN PARTIAL FUSION GENE
  misc_feature (1)..(705): HINGE CYSTEINES MUTATED TO SERINES (19-21; 37-39; 46-48)
gatcaggagcccaaatcttctgacaaaactcacacatccccaccgtccccagcacctgaactcctggggggaccgtcagtcttcctcttccccccaaaacccaaggacaccctcatgatctcccggacccctgaggtcacatgcgtggtggtggacgtgagccacgaagaccctgaggtcaagttcaactggtacgtggacggcgtggaggtgcataatgccaagacaaagccgcgggaggagcagtacaacagcacgtaccgtgtggtcagcgtcctcaccgtcctgcaccaggactggctgaatggcaaggagtacaagtgcaaggtctccaacaaagccctcccagcccccatcgagaaaacaatctccaaagccaaagggcagccccgagaaccacaggtgtacaccctgcccccatcccgggatgagctgaccaagaaccaggtcagcctgacctgcctggtcaaaggcttctatcccagcgacatcgccgtggagtgggagagcaatgggcagccggagaacaactacaagaccacgcctcccgtgctggactccgacggctccttcttcctctacagcaagctcaccgtggacaagagcaggtggcagcaggggaacgtcttctcatgctccgtgatgcatgaggctctgcacaaccactacacgcagaagagcctctccctgtctccgggtaaatgatctaga

SEQ ID NO: 7 - DNA, 729 bp, Artificial Sequence
  SYNTHETIC HUMAN PARTIAL FUSION GENE
  N_region (1)..(69): HUMAN IGA HINGE
  C_region (70)..(723): HUMAN WILD TYPE IGG1 CH2 AND CH3, FC
gatcagccagttccctcaactccacctaccccatctccctcaactccacctaccccatctccctcatgcgcacctgaactcctggggggaccgtcagtcttcctcttccccccaaaacccaaggacaccctcatgatctcccggacccctgaggtcacatgcgtggtggtggacgtgagccacgaagaccctgaggtcaagttcaactggtacgtggacggcgtggaggtgcataatgccaagacaaagccgcgggaggagcagtacaacagcacgtaccgtgtggtcagcgtcctcaccgtcctgcaccaggactggctgaatggcaaggagtacaagtgcaaggtctccaacaaagccctcccagcccccatcgagaaaacaatctccaaagccaaagggcagccccgagaaccacaggtgtacaccctgcccccatcccgggatgagctgaccaagaaccaggtcagcctgacctgcctggtcaaaggcttctatcccagcgacatcgccgtggagtgggagagcaatgggcagccggagaacaactacaagaccacgcctcccgtgctggactccgacggctccttcttcctctacagcaagctcaccgtggacaagagcaggtggcagcaggggaacgtcttctcatgctccgtgatgcatgaggctctgcacaaccactacacgcagaagagcctctccctgtctccgggtaaatgatctaga

SEQ ID NO: 8 - DNA, 825 bp, Artificial Sequence
  SYNTHETIC MOUSE SCFV FUSION GENE
  misc_feature (13)..(72): LIGHT CHAIN LEADER PEPTIDE
  V_region (73)..(405): LIGHT CHAIN VARIABLE DOMAIN FOR MOUSE ANTI-HUMAN CD19:  HD37
  misc_feature (406)..(450): SYNTHETIC (GLY4SER)3 LINKER PEPTIDE
  V_region (454)..(825): HEAVY CHAIN VARIABLE DOMAIN FOR MOUSE ANTI-HUMAN CD19:  HD37
aagcttgccgccatggagacagacacactcctgctatgggtgctgctgctctgggttccaggctccactggtgacattgtgctgacccaatctccagcttctttggctgtgtctctagggcagagggccaccatctcctgcaaggccagccaaagtgttgattatgatggtgatagttatttgaactggtaccaacagattccaggacagccacccaaactcctcatctatgatgcatccaatctagtttctgggatcccacccaggtttagtggcagtgggtctgggacagacttcaccctcaacatccatcctgtggagaaggtggatgctgcaacctatcactgtcagcaaagtactgaggatccgtggacgttcggtggaggcaccaagctggaaatcaaaggtggcggtggctcgggcggtggtgggtcgggtggcggcggatcgtcacaggttcagctgcagcagtctggggctgagctggtgaggcctgggtcctcagtgaagatttcctgcaaggcttctggctatgcattcagtagctactggatgaactgggtgaagcagaggcctggacagggtcttgagtggattggacagatttggcctggagatggtgatactaactacaatggaaagttcaagggtaaagccactctgactgcagacgaatcctccagcacagcctacatgcaactcagcagcctagcatctgaggactctgcggtctatttctgtgcaagacgggagactacgacggtaggccgttattactatgctatggactactggggtcaaggaacctcagtcaccgtctcctca

SEQ ID NO: 9 - DNA, 795 bp, Artificial Sequence
  SYNTHETIC MOUSE SCFV FUSION GENE
  misc_feature (13)..(72): LIGHT CHAIN LEADER PEPTIDE SEQUENCE
  V_region (73)..(393): LIGHT CHAIN VARIABLE DOMAIN FOR MOUSE ANTI-HUMAN CD37:  G28-1
  misc_feature (394)..(441): SYNTHETIC LINKER PEPTIDE ENCODED (GLY4SER)3
  V_region (442)..(795): HEAVY CHAIN VARIABLE DOMAIN FOR MOUSE ANTI-HUMAN CD37:  G28-1
aagcttgccgccatggtatccacagctcagttccttgggttgctgctgctgtggcttacaggtggcagatgtgacatccagatgactcagtctccagcctccctatctgcatctgtgggagagactgtcaccatcacatgtcgaacaagtgaaaatgtttacagttatttggcttggtatcagcagaaacagggaaaatctcctcagctcctggtctcttttgcaaaaaccttagcagaaggtgtgccatcaaggttcagtggcagtggatcaggcacacagttttctctgaagatcagcagcctgcagcctgaagattctggaagttatttctgtcaacatcattccgataatccgtggacgttcggtggaggcaccgaactggagatcaaaggtggcggtggctcgggcggtggtgggtcgggtggcggcggatcgtcagcggtccagctgcagcagtctggacctgagctggaaaagcctggcgcttcagtgaagatttcctgcaaggcttctggttactcattcactggctacaatatgaactgggtgaagcagaataatggaaagagccttgagtggattggaaatattgatccttattatggtggtactacctacaaccggaagttcaagggcaaggccacattgactgtagacaaatcctccagcacagcctacatgcagctcaagagtctgacatctgaggactctgcagtctattactgtgcaagatcggtcggccctatggactactggggtcaaggaacctcagtcaccgtctcttctgatcag

SEQ ID NO: 10 - DNA, 824 bp, Artificial Sequence
  SYNTHETIC MOUSE FUSION GENE
  sig_peptide (1)..(61): native light chain leader peptide
  V_region (62)..(397): LIGHT CHAIN VARIABLE DOMAIN FOR MOUSE ANTI-HUMAN CD22:  G28-7
  misc_feature (398)..(445): (gly4ser)3 linker peptide
  V_region (445)..(818): HEAVY CHAIN VARIABLE DOMAIN FOR MOUSE ANTI-HUMAN CD22:  G28-7
  misc_feature (819)..(824): BclI restriction site
atggagtcacattcccaggtctttctctccctgctgctctgggtatctggtacctgtgggaacattatgatgacacagtcgccatcatctctggctgtgtcagcaggagaaaaggtcactatgaactgtaagtccagtcaaagtgttttctacagttcaaatcagaggaattatttggcctggtatcagcagaaaccagggcagtctcccaaattgctgatctactgggcatctactagggaatctggtgtccctgatcgcttcacaggcagtggatccgggacagactttactcttaccatcagcagtgtacatactgaagacctggcagtttattactgtcatcaattcctctcttcgtggacgttcggtggaggcaccaagctggaaatcaaaggcggtggtggttcgggtggtggtggttcgggtggcggcggatcttctcaggtccaactgcagcagcctggggctgaactggtgaagcctgggacttcagtgaagctgtcctgcaaggcctctggctacaccttcaccaactactggatggtctgggtgaagcagacgcctggagaaggccttgagtggattggagaaattattcctagcaacggtcgtactaaatacaatgagaagttcaagagcaaggccacactgactgcagacaaatcctcccgcacagcctacatgcaactcagcagcctggcatctgaggactctgcggtctattattgtgcaagagagatgtccattattactacggtactgactcccggtttgcttactggggccaagggactctggtcactgtctctgcagcctgatca

SEQ ID NO: 11 - protein, 266 aa, Mus musculus
  INIT_MET (1)..(1)
  SIGNAL (1)..(22)
  DOMAIN (23)..(128): LIGHT CHAIN VARIABLE DOMAIN FOR MOUSE ANTI-HUMAN CD20
  SITE (129)..(144): ASP-(GLY3SER)-(GLY4SER)2-SER LINKER PEPTIDE
  DOMAIN (145)..(266): HEAVY CHAIN VARIABLE DOMAIN FOR MOUSE ANTI-HUMAN CD20
MDFQVQIFSFLLISASVIIARGQIVLSQSPAILSASPGEKVTMTCRASSSVSYMHWYQQKPGSSPKPWIYAPSNLASGVPARFSGSGSGTSYSLTISRVEAEDAATYYCQQWSFNPPTFGAGTKLELKDGGGSGGGGSGGGGSSQAYLQQSGAELVRPGASVKMSCKASGYTFTSYNMHWVKQTPRQGLEWIGAIYPGNGDTSYNQKFKGKATLTVDKSSSTAYMQLSSLTSEDSAVYFCARVVYYSNSYWYFDVWGTGTTVTVSD

SEQ ID NO: 12 - protein, 271 aa, Mus musculus
  SITE (1)..(271): MOUSE ANTI-HUMAN CD19 SCFV
METDTLLLWVLLLWVPGSTGDIVLTQSPASLAVSLGQRATISCKASQSVDYDGDSYLNWYQQIPGQPPKLLIYDASNLVSGIPPRFSGSGSGTDFTLNIHPVEKVDAATYHCQQSTEDPWTFGGGTKLEIKGGGGSGGGGSGGGGSSQVQLQQSGAELVRPGSSVKISCKASGYAFSSYWMNWVKQRPGQGLEWIGQIWPGDGDTNYNGKFKGKATLTADESSSTAYMQLSSLASEDSAVYFCARRETTTVGRYYYAMDYWGQGTSVTVSS

SEQ ID NO: 13 - protein, 259 aa, Mus musculus
  SITE (1)..(259): MOUSE ANTI-HUMAN CD37 SCFV
MVSTAQFLGLLLLWLTGGRCDIQMTQSPASLSASVGETVTITCRTSENVYSYLAWYQQKQGKSPQLLVSFAKTLAEGVPSRFSGSGSGTQFSLKISSLQPEDSGSYFCQHHSDNPWTFGGGTELEIKGGGGSGGGGSGGGGSSAVQLQQSGPELEKPGASVKISCKASGYSFTGYNMNWVKQNNGKSLEWIGNIDPYYGGTTYNRKFKGKATLTVDKSSSTAYMQLKSLTSEDSAVYYCARSVGPMDYWGQGTSVTVSS

SEQ ID NO: 14 - protein, 272 aa, Mus musculus
  SITE (1)..(272): MOUSE ANTI-HUMAN CD22 SCFV
MESHSQVFLSLLLWVSGTCGNIMMTQSPSSLAVSAGEKVTMNCKSSQSVFYSSNQRNYLAWYQQKPGQSPKLLIYWASTRESGVPDRFTGSGSGTDFTLTISSVHTEDLAVYYCHQFLSSWTFGGGTKLEIKGGGGSGGGGSGGGGSSQVQLQQPGAELVKPGTSVKLSCKASGYTFTNYWMVWVKQTPGEGLEWIGEIIPSNGRTKYNEKFKSKATLTADKSSRTAYMQLSSLASEDSAVYYCAREMSIITTVLTPGLLTGAKGLWSLSLQ

SEQ ID NO: 15 - protein, 499 aa, Artificial Sequence
  MOUSE-HUMAN HYBRID FUSION PROTEIN
  SITE (1)..(265): MOUSE ANTI-HUMAN CD20 SCFV:  2H7
  DOMAIN (266)..(499): HUMAN IGG1 WILD TYPE HINGE, CH2, CH3 FC
MDFQVQIFSFLLISASVIIARGQIVLSQSPAILSASPGEKVTMTCRASSSVSYMHWYQQKPGSSPKPWIYAPSNLASGVPARFSGSGSGTSYSLTISRVEAEDAATYYCQQWSFNPPTFGAGTKLELKDGGGSGGGGSGGGGSSQAYLQQSGAELVRPGASVKMSCKASGYTFTSYNMHWVKQTPRQGLEWIGAIYPGNGDTSYNQKFKGKATLTVDKSSSTAYMQLSSLTSEDSAVYFCARVVYYSNSYWYFDVWGTGTTVTVSDQEPKSCDKTHTCPPCPAPELLGGPSVFLFPPKPKDTLMISRTPEVTCVVVDVSHEDPEVKFNWYVDGVEVHNAKTKPREEQYNSTYRVVSVLTVLHQDWLNGKEYKCKVSNKALPAPIEKTISKAKGQPREPQVYTLPPSRDELTKNQVSLTCLVKGFYPSDIAVEWESNGQPENNYKTTPPVLDSDGSFFLYSKLTVDKSRWQQGNVFSCSVMHEALHNHYTQKSLSLSPGK

SEQ ID NO: 16 - protein, 499 aa, Artificial Sequence
  MOUSE-HUMAN HYBRID FUSION PROTEIN
  SITE (1)..(265): 2H7 SCFV TARGETED TO HUMAN CD20
  DOMAIN (265)..(499): HINGE CYSTEINES MUTATED TO SERINES (AMINO ACIDS 272, 278, 281) PROLINE IN CH2 MUTATED TO SERINE (AMINO ACID 290)
MDFQVQIFSFLLISASVIIARGQIVLSQSPAILSASPGEKVTMTCRASSSVSYMHWYQQKPGSSPKPWIYAPSNLASGVPARFSGSGSGTSYSLTISRVEAEDAATYYCQQWSFNPPTFGAGTKLELKDGGGSGGGGSGGGGSSQAYLQQSGAELVRPGASVKMSCKASGYTFTSYNMHWVKQTPRQGLEWIGAIYPGNGDTSYNQKFKGKATLTVDKSSSTAYMQLSSLTSEDSAVYFCARVVYYSNSYWYFDVWGTGTTVTVSDQEPKSSDKTHTSPPSPAPELLGGSSVFLFPPKPKDTLMISRTPEVTCVVVDVSHEDPEVKFNWYVDGVEVHNAKTKPREEQYNSTYRVVSVLTVLHQDWLNGKEYKCKVSNKALPAPIEKTISKAKGQPREPQVYTLPPSRDELTKNQVSLTCLVKGFYPSDIAVEWESNGQPENNYKTTPPVLDSDGSFFLYSKLTVDKSRWQQGNVFSCSVMHEALHNHYTQKSLSLSPGK

SEQ ID NO: 17 - protein, 499 aa, Artificial Sequence
  MOUSE-HUMAN HYBRID FUSION PROTEIN
  SITE (1)..(265): MOUSE ANTI-HUMAN CD20 SCFV:  2H7
  DOMAIN (266)..(499): HINGE CYSTEINES MUTATED TO SERINES (AMINO ACIDS 272, 278, 281) CH2 AND CH3 DOMAINS ARE WILD TYPE IN SEQUENCE
MDFQVQIFSFLLISASVIIARGQIVLSQSPAILSASPGEKVTMTCRASSSVSYMHWYQQKPGSSPKPWIYAPSNLASGVPARFSGSGSGTSYSLTISRVEAEDAATYYCQQWSFNPPTFGAGTKLELKDGGGSGGGGSGGGGSSQAYLQQSGAELVRPGASVKMSCKASGYTFTSYNMHWVKQTPRQGLEWIGAIYPGNGDTSYNQKFKGKATLTVDKSSSTAYMQLSSLTSEDSAVYFCARVVYYSNSYWYFDVWGTGTTVTVSDQEPKSSDKTHTSPPSPAPELLGGPSVFLFPPKPKDTLMISRTPEVTCVVVDVSHEDPEVKFNWYVDGVEVHNAKTKPREEQYNSTYRVVSVLTVLHQDWLNGKEYKCKVSNKALPAPIEKTISKAKGQPREPQVYTLPPSRDELTKNQVSLTCLVKGFYPSDIAVEWESNGQPENNYKTTPPVLDSDGSFFLYSKLTVDKSRWQQGNVFSCSVMHEALHNHYTQKSLSLSPGK

SEQ ID NO: 18 - protein, 505 aa, Artificial Sequence
  MOUSE-HUMAN FUSION PROTEIN
  SITE (1)..(265): MOUSE ANTI-HUMAN CD20 SCFV:  2H7
  DOMAIN (266)..(288): WILD TYPE IGA HINGE
  DOMAIN (289)..(505): HUMAN IGG1 CH2 AND CH3 DOMAINS, WILD TYPE SEQUENCE
MDFQVQIFSFLLISASVIIARGQIVLSQSPAILSASPGEKVTMTCRASSSVSYMHWYQQKPGSSPKPWIYAPSNLASGVPARFSGSGSGTSYSLTISRVEAEDAATYYCQQWSFNPPTFGAGTKLELKDGGGSGGGGSGGGGSSQAYLQQSGAELVRPGASVKMSCKASGYTFTSYNMHWVKQTPRQGLEWIGAIYPGNGDTSYNQKFKGKATLTVDKSSSTAYMQLSSLTSEDSAVYFCARVVYYSNSYWYFDVWGTGTTVTVSDQPVPSTPPTPSPSTPPTPSPSCAPELLGGPSVFLFPPKPKDTLMISRTPEVTCVVVDVSHEDPEVKFNWYVDGVEVHNAKTKPREEQYNSTYRVVSVLTVLHQDWLNGKEYKCKVSNKALPAPIEKTISKAKGQPREPQVYTLPPSRDELTKNQVSLTCLVKGFYPSDIAVEWESNGQPENNYKTTPPVLDSDGSFFLYSKLTVDKSRWQQGNVFSCSVMHEALHNHYTQKSLSLSPGK

SEQ ID NO: 19 - protein, 234 aa, Homo sapiens
  DOMAIN (1)..(234): MUTANT IGG1 HINGE (AMINO ACIDS 7, 13, 16) WILD TYPE CH2 AND CH3 DOMAINS ALTERNATIVE CARBOXY TERMINUS OF SCFVIG FUSION PROTEINS
DQEPKSSDKTHTSPPSPAPELLGGPSVFLFPPKPKDTLMISRTPEVTCVVVDVSHEDPEVKFNWYVDGVEVHNAKTKPREEQYNSTYRVVSVLTVLHQDWLNGKEYKCKVSNKALPAPIEKTISKAKGQPREPQVYTLPPSRDELTKNQVSLTCLVKGFYPSDIAVEWESNGQPENNYKTTPPVLDSDGSFFLYSKLTVDKSRWQQGNVFSCSVMHEALHNHYTQKSLSLSPGK

SEQ ID NO: 20 - protein, 240 aa, Homo sapiens
  SITE (1)..(23): ALTERNATIVE CARBOXY TERMINUS OF SCFVIG FUSION PROTEINS
  DOMAIN (24)..(240): HUMAN IGG1 WILD TYPE CH2 AND CH3 FC
DQPVPSTPPTPSPSTPPTPSPSCAPELLGGPSVFLFPPKPKDTLMISRTPEVTCVVVDVSHEDPEVKFNWYVDGVEVHNAKTKPREEQYNSTYRVVSVLTVLHQDWLNGKEYKCKVSNKALPAPIEKTISKAKGQPREPQVYTLPPSRDELTKNQVSLTCLVKGFYPSDIAVEWESNGQPENNYKTTPPVLDSDGSFFLYSKLTVDKSRWQQGNVFSCSVMHEALHNHYTQKSLSLSPGK

SEQ ID NO: 21 - DNA, 1470 bp, Artificial Sequence
  MOUSE-HUMAN HYBRID
  misc_feature (1)..(808): MOUSE ANTI-HUMAN CD20 SCFV
  misc_feature (814)..(1455): HUMAN EXTRACELLULAR DOMAIN LONG FORM, CD154
aagcttgccgccatggattttcaagtgcagattttcagcttcctgctaatcagtgcttcagtcataattgccagaggacaaattgttctctcccagtctccagcaatcctgtctgcatctccaggggagaaggtcacaatgacttgcagggccagctcaagtgtaagttacatgcactggtaccagcagaagccaggatcctcccccaaaccctggatttatgccccatccaacctggcttctggagtccctgctcgcttcagtggcagtgggtctgggacctcttactctctcacaatcagcagagtggaggctgaagatgctgccacttattactgccagcagtggagttttaacccacccacgttcggtgctgggaccaagctggagctgaaagatggcggtggctcgggcggtggtggatctggaggaggtgggagctctcaggcttatctacagcagtctggggctgagctggtgaggcctggggcctcagtgaagatgtcctgcaaggcttctggctacacatttaccagttacaatatgcactgggtaaagcagacacctagacagggcctggaatggattggagctatttatccaggaaatggtgatacttcctacaatcagaagttcaagggcaaggccacactgactgtagacaaatcctccagcacagcctacatgcagctcagcagcctgacatctgaagactctgcggtctatttctgtgcaagagtggtgtactatagtaactcttactggtacttcgatgtctggggcacagggaccacggtcaccgtctctgatccaagaaggttggacaagatagaagatgaaaggaatcttcatgaagattttgtattcatgaaaacgatacagagatgcaacacaggagaaagatccttatccttactgaactgtgaggagattaaaagccagtttgaaggctttgtgaaggatataatgttaaacaaagaggagacgaagaaagaaaacagctttgaaatgcaaaaaggtgatcagaatcctcaaattgcggcacatgtcataagtgaggccagcagtaaaacaacatctgtgttacagtgggctgaaaaaggatactacaccatgagcaacaacttggtaaccctggaaaatgggaaacagctgaccgttaaaagacaaggactctattatatctatgcccaagtcaccttctgttccaatcgggaagcttcgagtcaagctccatttatagccagcctctgcctaaagtcccccggtagattcgagagaatcttactcagagctgcaaatacccacagttccgccaaaccttgcgggcaacaatccattcacttgggaggagtatttgaattgcaaccaggtgcttcggtgtttgtcaatgtgactgatccaagccaagtgagccatggcactggcttcacgtcctttggcttactcaaactcgagtgataatctaga

SEQ ID NO: 22 - DNA, 1290 bp, Artificial Sequence
  MOUSE-HUMAN HYBRID
  misc_feature (13)..(808): MOUSE ANTI-HUMAN CD20 SCFV
  misc_feature (814)..(1275): HUMAN EXTRACELLULAR DOMAIN, SHORT FORM, CD154
aagcttgccgccatggattttcaagtgcagattttcagcttcctgctaatcagtgcttcagtcataattgccagaggacaaattgttctctcccagtctccagcaatcctgtctgcatctccaggggagaaggtcacaatgacttgcagggccagctcaagtgtaagttacatgcactggtaccagcagaagccaggatcctcccccaaaccctggatttatgccccatccaacctggcttctggagtccctgctcgcttcagtggcagtgggtctgggacctcttactctctcacaatcagcagagtggaggctgaagatgctgccacttattactgccagcagtggagttttaacccacccacgttcggtgctgggaccaagctggagctgaaagatggcggtggctcgggcggtggtggatctggaggaggtgggagctctcaggcttatctacagcagtctggggctgagctggtgaggcctggggcctcagtgaagatgtcctgcaaggcttctggctacacatttaccagttacaatatgcactgggtaaagcagacacctagacagggcctggaatggattggagctatttatccaggaaatggtgatacttcctacaatcagaagttcaagggcaaggccacactgactgtagacaaatcctccagcacagcctacatgcagctcagcagcctgacatctgaagactctgcggtctatttctgtgcaagagtggtgtactatagtaactcttactggtacttcgatgtctggggcacagggaccacggtcaccgtctctgatccagaaaacagctttgaaatgcaaaaaggtgatcagaatcctcaaattgcggcacatgtcataagtgaggccagcagtaaaacaacatctgtgttacagtgggctgaaaaaggatactacaccatgagcaacaacttggtaaccctggaaaatgggaaacagctgaccgttaaaagacaaggactctattatatctatgcccaagtcaccttctgttccaatcgggaagcttcgagtcaagctccatttatagccagcctctgcctaaagtcccccggtagattcgagagaatcttactcagagctgcaaatacccacagttccgccaaaccttgcgggcaacaatccattcacttgggaggagtatttgaattgcaaccaggtgcttcggtgtttgtcaatgtgactgatccaagccaagtgagccatggcactggcttcacgtcctttggcttactcaaactcgagtgataatctaga

SEQ ID NO: 23 - DNA, 43 bp, Artificial Sequence
  OLIGONUCLEOTIDE
gtcaagcttgccgccatggattttcaagtgcagatttttcagc

SEQ ID NO: 24 - DNA, 74 bp, Artificial Sequence
  OLIGONUCLEOTIDE
gtcgtcgagctcccacctcctccagatccaccaccgcccgagccaccgccacctttcagctccagcttggtccc

SEQ ID NO: 25 - DNA, 37 bp, Artificial Sequence
  OLIGONUCLEOTIDE
gctgctgagctctcaggcttatctacagcaagtctgg

SEQ ID NO: 26 - DNA, 32 bp, Artificial Sequence
  OLIGONUCLEOTIDE
gttgtctgatcagagacggtgaccgtggtccc

SEQ ID NO: 27 - DNA, 34 bp, Artificial Sequence
  OLIGONUCLEOTIDE
gttgtcggatccagaaaacagctttgaaatgcaa

SEQ ID NO: 28 - DNA, 44 bp, Artificial Sequence
  OLIGONUCLEOTIDE
gttgtttctagattatcactcgagtttgagtaagccaaaggacg

SEQ ID NO: 29 - DNA, 35 bp, Artificial Sequence
  OLIGONUCLEOTIDE
gttgtcggatccaagaaggttggacaagatagaag

SEQ ID NO: 30 - DNA, 23 bp, Artificial Sequence
  OLIGONUCLEOTIDE
gtctatataagcagagctctggc

SEQ ID NO: 31 - DNA, 25 bp, Artificial Sequence
  OLIGONUCLEOTIDE
cgaggctgatcagcgagctctagca

SEQ ID NO: 32 - DNA, 25 bp, Artificial Sequence
  OLIGONUCLEOTIDE
ccgcaatttgaggattctgatcacc

SEQ ID NO: 33 - protein, 482 aa, Artificial Sequence
  MOUSE-HUMAN HYBRID FUSION PROTEIN
  SITE (1)..(266): MOUSE ANTI-HUMAN CD20 SCFV
  DOMAIN (268)..(481): EXTRACELLULAR DOMAIN, LONG FORM, HUMAN CD154
MDFQVQIFSFLLISASVIIARGQIVLSQSPAILSASPGEKVTMTCRASSSVSYMHWYQQKPGSSPKPWIYAPSNLASGVPARFSGSGSGTSYSLTISRVEAEDAATYYCQQWSFNPPTFGAGTKLELKDGGGSGGGGSGGGGSSQAYLQQSGAELVRPGASVKMSCKASGYTFTSYNMHWVKQTPRQGLEWIGAIYPGNGDTSYNQKFKGKATLTVDKSSSTAYMQLSSLTSEDSAVYFCARVVYYSNSYWYFDVWGTGTTVTVSDPRRLDKIEDERNLHEDFVFMKTIQRCNTGERSLSLLNCEEIKSQFEGFVKDIMLNKEETKKENSFEMQKGDQNPQIAAHVISEASSKTTSVLQWAEKGYYTMSNNLVTLENGKQLTVKRQGLYYIYAQVTFCSNREASSQAPFIASLCLKSPGRFERILLRAANTHSSAKPCGQQSIHLGGVFELQPGASVFVNVTDPSQVSHGTGFTSFGLLKLE

SEQ ID NO: 34 - protein, 422 aa, Artificial Sequence
  MOUSE-HUMAN HYBRID FUSION PROTEIN
  SITE (1)..(266): MOUSE ANTI-HUMAN SCFV
  DOMAIN (268)..(421)<223>  EXTRACELLULAR DOMAIN, SHORT FORM, HUMAN CD154
MDFQVQIFSFLLISASVIIARGQIVLSQSPAILSASPGEKVTMTCRASSSVSYMHWYQQKPGSSPKPWIYAPSNLASGVPARFSGSGSGTSYSLTISRVEAEDAATYYCQQWSFNPPTFGAGTKLELKDGGGSGGGGSGGGGSSQAYLQQSGAELVRPGASVKMSCKASGYTFTSYNMHWVKQTPRQGLEWIGAIYPGNGDTSYNQKFKGKATLTVDKSSSTAYMQLSSLTSEDSAVYFCARVVYYSNSYWYFDVWGTGTTVTVSDPENSFEMQKGDQNPQIAAHVISEASSKTTSVLQWAEKGYYTMSNNLVTLENGKQLTVKRQGLYYIYAQVTFCSNREASSQAPFIASLCLKSPGRFERILLRAANTHSSAKPCGQQSIHLGGVFELQPGASVFVNVTDPSQVSHGTGFTSFGLLKLE

SEQ ID NO: 35 - DNA, 63 bp, Homo sapiens
  N_region (1)..(63): PORTION OF HUMAN IGA HINGE DOMAIN CONTAINING ONLY 1 CYSTEINE
ccagttccctcaactccacctaccccatctccctcaactccacctaccccatctccctcatgc

SEQ ID NO: 36 - protein, 21 aa, Homo sapiens
PVPSTPPTPSPSTPPTPSPSC

SEQ ID NO: 37 - DNA, 763 bp, Homo sapiens
  misc_feature (1)..(6): BCLI SITE FOR FUSION TO AMIN TERMINAL SCFVS
  N_region (8)..(752): WILD TYPE IGA HINGE, CH2, CH3 DOMAINS TRUNCATED TO REMOVE SECRETORY COMPONENT ATTACHMENT
tgatcagccagttccctcaactccacctaccccatctccctcaactccacctaccccatctccctcatgctgccacccccgactgtcactgcaccgaccggccctcgaggacctgctcttaggttcagaagcgatcctcacgtgcacactgaccggcctgagagatgcctcaggtgtcaccttcacctggacgccctcaagtgggaagagcgctgttcaaggaccacctgaccgtgacctctgtggctgctacagcgtgtccagtgtcctgccgggctgtgccgagccatggaaccatgggaagaccttcacttgcactgctgcctaccccgagtccaagaccccgctaaccgccaccctctcaaaatccggaaacacattccggcccgaggtccacctgctgccgccgccgtcggaggagctggccctgaacgagctggtgacgctgacgtgcctggcacgtggcttcagccccaaggatgtgctggttcgctggctgcaggggtcacaggagctgccccgcgagaagtacctgacttgggcatcccggcaggagcccagccagggcaccaccaccttcgctgtgaccagcatactgcgcgtggcagccgaggactggaagaagggggacaccttctcctgcatggtgggccacgaggccctgccgctggccttcacacagaagaccatcgaccgcttggcgggtaaacccacccatgtcaatgtgtctgttgtcatggcggaggtggactgataatctaga

SEQ ID NO: 38 - protein, 250 aa, Homo sapiens
  DOMAIN (3)..(250): TRUNCATED FORM, REMOVAL OF LAST THREE AMINO ACIDS THAT MEDIATE AT TACHMENT TO SECRETORY COMPONEN
DQPVPSTPPTPSPSTPPTPSPSCCHPRLSLHRPALEDLLLGSEAILTCTLTGLRDASGVTFTWTPSSGKSAVQGPPDRDLCGCYSVSSVLPGCAEPWNHGKTFTCTAAYPESKTPLTATLSKSGNTFRPEVHLLPPPSEELALNELVTLTCLARGFSPKDVLVRWLQGSQELPREKYLTWASRQEPSQGTTTFAVTSILRVAAEDWKKGDTFSCMVGHEALPLAFTQKTIDRLAGKPTHVNVSVVMAEVD

SEQ ID NO: 39 - protein, 5 aa, Artificial Sequence
  Linker polypeptide
GGGGS

SEQ ID NO: 40 - protein, 4 aa, Artificial Sequence
  Sequence contained in the core hinge region of human IgG1.
CPPC

SEQ ID NO: 41 - protein, 24 aa, Artificial Sequence
  Human IgA-derived hinge.
PASPSPTPPTSPSPTPPTSPVPQD

SEQ ID NO: 42 - DNA, 1593 bp, Homo sapiens
ccggcgcagcgcggccgcagcagcctccgccccccgcacggtgtgagcgcccgccgcggccgaggcggccggagtcccgagctagccccggcggccgccgccgcccagaccggacgacaggccacctcgtcggcgtccgcccgagtccccgcctcgccgccaacgccacaaccaccgcgcacggccccctgactccgtccagtattgatcgggagagccggagcgagctcttcggggagcagcgatgcgaccctccgggacggccggggcagcgctcctggcgctgctggctgcgctctgcccggcgagtcgggctctggaggaaaagaaagtttgccaaggcacgagtaacaagctcacgcagttgggcacttttgaagatcattttctcagcctccagaggatgttcaataactgtgaggtggtccttgggaatttggaaattacctatgtgcagaggaattatgatctttccttcttaaagaccatccaggaggtggctggttatgtcctcattgccctcaacacagtggagcgaattcctttggaaaacctgcagatcatcagaggaaatatgtactacgaaaattcctatgccttagcagtcttatctaactatgatgcaaataaaaccggactgaaggagctgcccatgagaaatttacaggaaatcctgcatggcgccgtgcggttcagcaacaaccctgccctgtgcaatgtggagagcatccagtggcgggacatagtcagcagtgactttctcagcaacatgtcgatggacttccagaaccacctgggcagctgccaaaagtgtgatccaagctgtcccaatgggagctgctggggtgcaggagaggagaactgccagaaactgaccaaaatcatctgtgcccagcagtgctccgggcgctgccgtggcaagtcccccagtgactgctgccacaaccagtgtgctgcaggctgcacaggcccccgggagagcgactgcctggtctgccgcaaattccgagacgaagccacgtgcaaggacacctgccccccactcatgctctacaaccccaccacgtaccagatggatgtgaaccccgagggcaaatacagctttggtgccacctgcgtgaagaagtgtccccgtaattatgtggtgacagatcacggctcgtgcgtccgagcctgtggggccgacagctatgagatggaggaagacggcgtccgcaagtgtaagaagtgcgaagggccttgccgcaaagtgtgtaacggaataggtattggtgaatttaaagactcactctccataaatgctacgaatattaaacacttcaaaaactgcacctccatcagtggcgatctccacatcctgccggtggcatttaggggtgactccttcacacatactcctcctctggatccacaggaactggatattctgaaaaccgtaaaggaaatcacaggtttgagctgaattatcacatgaatataaatgggaaatcagtgttttagagagagaacttttcgacatatttcctgttcccttggaataaaaacatttcttctgaaattttaccgttaaaaaaaaaaaaaaaaaaaaaaaaa

SEQ ID NO: 43 - protein, 405 aa, Homo sapiens
MRPSGTAGAALLALLAALCPASRALEEKKVCQGTSNKLTQLGTFEDHFLSLQRMFNNCEVVLGNLEITYVQRNYDLSFLKTIQEVAGYVLIALNTVERIPLENLQIIRGNMYYENSYALAVLSNYDANKTGLKELPMRNLQEILHGAVRFSNNPALCNVESIQWRDIVSSDFLSNMSMDFQNHLGSCQKCDPSCPNGSCWGAGEENCQKLTKIICAQQCSGRCRGKSPSDCCHNQCAAGCTGPRESDCLVCRKFRDEATCKDTCPPLMLYNPTTYQMDVNPEGKYSFGATCVKKCPRNYVVTDHGSCVRACGADSYEMEEDGVRKCKKCEGPCRKVCNGIGIGEFKDSLSINATNIKHFKNCTSISGDLHILPVAFRGDSFTHTPPLDPQELDILKTVKEITGLS

SEQ ID NO: 44 - DNA, 4473 bp, Homo sapiens
aaggggaggtaaccctggcccctttggtcggggccccgggcagccgcgcgccccttcccacggggccctttactgcgccgcgcgcccggcccccacccctcgcagcaccccgcgccccgcgccctcccagccgggtccagccggagccatggggccggagccgcagtgagcaccatggagctggcggccttgtgccgctgggggctcctcctcgccctcttgccccccggagccgcgagcacccaagtgtgcaccggcacagacatgaagctgcggctccctgccagtcccgagacccacctggacatgctccgccacctctaccagggctgccaggtggtgcagggaaacctggaactcacctacctgcccaccaatgccagcctgtccttcctgcaggatatccaggaggtgcagggctacgtgctcatcgctcacaaccaagtgaggcaggtcccactgcagaggctgcggattgtgcgaggcacccagctctttgaggacaactatgccctggccgtgctagacaatggagacccgctgaacaataccacccctgtcacaggggcctccccaggaggcctgcgggagctgcagcttcgaagcctcacagagatcttgaaaggaggggtcttgatccagcggaacccccagctctgctaccaggacacgattttgtggaaggacatcttccacaagaacaaccagctggctctcacactgatagacaccaaccgctctcgggcctgccacccctgttctccgatgtgtaagggctcccgctgctggggagagagttctgaggattgtcagagcctgacgcgcactgtctgtgccggtggctgtgcccgctgcaaggggccactgcccactgactgctgccatgagcagtgtgctgccggctgcacgggccccaagcactctgactgcctggcctgcctccacttcaaccacagtggcatctgtgagctgcactgcccagccctggtcacctacaacacagacacgtttgagtccatgcccaatcccgagggccggtatacattcggcgccagctgtgtgactgcctgtccctacaactacctttctacggacgtgggatcctgcaccctcgtctgccccctgcacaaccaagaggtgacagcagaggatggaacacagcggtgtgagaagtgcagcaagccctgtgcccgagtgtgctatggtctgggcatggagcacttgcgagaggtgagggcagttaccagtgccaatatccaggagtttgctggctgcaagaagatctttgggagcctggcatttctgccggagagctttgatggggacccagcctccaacactgccccgctccagccagagcagctccaagtgtttgagactctggaagagatcacaggttacctatacatctcagcatggccggacagcctgcctgacctcagcgtcttccagaacctgcaagtaatccggggacgaattctgcacaatggcgcctactcgctgaccctgcaagggctgggcatcagctggctggggctgcgctcactgagggaactgggcagtggactggccctcatccaccataacacccacctctgcttcgtgcacacggtgccctgggaccagctctttcggaacccgcaccaagctctgctccacactgccaaccggccagaggacgagtgtgtgggcgagggcctggcctgccaccagctgtgcgcccgagggcactgctggggtccagggcccacccagtgtgtcaactgcagccagttccttcggggccaggagtgcgtggaggaatgccgagtactgcaggggctccccagggagtatgtgaatgccaggcactgtttgccgtgccaccctgagtgtcagccccagaatggctcagtgacctgttttggaccggaggctgaccagtgtgtggcctgtgcccactataaggaccctcccttctgcgtggcccgctgccccagcggtgtgaaacctgacctctcctacatgcccatctggaagtttccagatgaggagggcgcatgccagccttgccccatcaactgcacccactcctgtgtggacctggatgacaagggctgccccgccgagcagagagccagccctctgacgtccatcatctctgcggtggttggcattctgctggtcgtggtcttgggggtggtctttgggatcctcatcaagcgacggcagcagaagatccggaagtacacgatgcggagactgctgcaggaaacggagctggtggagccgctgacacctagcggagcgatgcccaaccaggcgcagatgcggatcctgaaagagacggagctgaggaaggtgaaggtgcttggatctggcgcttttggcacagtctacaagggcatctggatccctgatggggagaatgtgaaaattccagtggccatcaaagtgttgagggaaaacacatcccccaaagccaacaaagaaatcttagacgaagcatacgtgatggctggtgtgggctccccatatgtctcccgccttctgggcatctgcctgacatccacggtgcagctggtgacacagcttatgccctatggctgcctcttagaccatgtccgggaaaaccgcggacgcctgggctcccaggacctgctgaactggtgtatgcagattgccaaggggatgagctacctggaggatgtgcggctcgtacacagggacttggccgctcggaacgtgctggtcaagagtcccaaccatgtcaaaattacagacttcgggctggctcggctgctggacattgacgagacagagtaccatgcagatgggggcaaggtgcccatcaagtggatggcgctggagtccattctccgccggcggttcacccaccagagtgatgtgtggagttatggtgtgactgtgtgggagctgatgacttttggggccaaaccttacgatgggatcccagcccgggagatccctgacctgctggaaaagggggagcggctgccccagccccccatctgcaccattgatgtctacatgatcatggtcaaatgttggatgattgactctgaatgtcggccaagattccgggagttggtgtctgaattctcccgcatggccagggacccccagcgctttgtggtcatccagaatgaggacttgggcccagccagtcccttggacagcaccttctaccgctcactgctggaggacgatgacatgggggacctggtggatgctgaggagtatctggtaccccagcagggcttcttctgtccagaccctgccccgggcgctgggggcatggtccaccacaggcaccgcagctcatctaccaggagtggcggtggggacctgacactagggctggagccctctgaagaggaggcccccaggtctccactggcaccctccgaaggggctggctccgatgtatttgatggtgacctgggaatgggggcagccaaggggctgcaaagcctccccacacatgaccccagccctctacagcggtacagtgaggaccccacagtacccctgccctctgagactgatggctacgttgcccccctgacctgcagcccccagcctgaatatgtgaaccagccagatgttcggccccagcccccttcgccccgagagggccctctgcctgctgcccgacctgctggtgccactctggaaaggcccaagactctctccccagggaagaatggggtcgtcaaagacgtttttgcctttgggggtgccgtggagaaccccgagtacttgacaccccagggaggagctgcccctcagccccaccctcctcctgccttcagcccagccttcgacaacctctattactgggaccaggacccaccagagcggggggctccacccagcaccttcaaagggacacctacggcagagaacccagagtacctgggtctggacgtgccagtgtgaaccagaaggccaagtccgcagaagccctgatgtgtcctcagggagcagggaaggcctgacttctgctggcatcaagaggtgggagggccctccgaccacttccaggggaacctgccatgccaggaacctgtcctaaggaaccttccttcctgcttgagttcccagatggctggaaggggtccagcctcgttggaagaggaacagcactggggagtctttgtggattctgaggccctgcccaatgagactctagggtccagtggatgccacagcccagcttggccctttccttccagatcctgggtactgaaagccttagggaagctggcctgagaggggaagcggccctaagggagtgtctaagaacaaaagcgacccattcagagactgtccctgaaacctagtactgccccccatgaggaaggaacagcaatggtgtcagtatccaggctttgtacagagtgcttttctgtttagtttttactttttttgttttgtttttttaaagatgaaataaagacccagggggag

SEQ ID NO: 45 - protein, 1255 aa, Homo sapiens [sequence omitted]

SEQ ID NO: 46 - DNA, 5484 bp, Homo sapiens
aattgtcagcacgggatctgagacttccaaaaaatgaagccggcgacaggactttgggtctgggtgagccttctcgtggcggcggggaccgtccagcccagcgattctcagtcagtgtgtgcaggaacggagaataaactgagctctctctctgacctggaacagcagtaccgagccttgcgcaagtactatgaaaactgtgaggttgtcatgggcaacctggagataaccagcattgagcacaaccgggacctctccttcctgcggtctgttcgagaagtcacaggctacgtgttagtggctcttaatcagtttcgttacctgcctctggagaatttacgcattattcgtgggacaaaactttatgaggatcgatatgccttggcaatatttttaaactacagaaaagatggaaactttggacttcaagaacttggattaaagaacttgacagaaatcctaaatggtggagtctatgtagaccagaacaaattcctttgttatgcagacaccattcattggcaagatattgttcggaacccatggccttccaacttgactcttgtgtcaacaaatggtagttcaggatgtggacgttgccataagtcctgtactggccgttgctggggacccacagaaaatcattgccagactttgacaaggacggtgtgtgcagaacaatgtgacggcagatgctacggaccttacgtcagtgactgctgccatcgagaatgtgctggaggctgctcaggacctaaggacacagactgctttgcctgcatgaatttcaatgacagtggagcatgtgttactcagtgtccccaaacctttgtctacaatccaaccacctttcaactggagcacaatttcaatgcaaagtacacatatggagcattctgtgtcaagaaatgtccacataactttgtggtagattccagttcttgtgtgcgtgcctgccctagttccaagatggaagtagaagaaaatgggattaaaatgtgtaaaccttgcactgacatttgcccaaaagcttgtgatggcattggcacaggatcattgatgtcagctcagactgtggattccagtaacattgacaaattcataaactgtaccaagatcaatgggaatttgatctttctagtcactggtattcatggggacccttacaatgcaattgaagccatagacccagagaaactgaacgtctttcggacagtcagagagataacaggtttcctgaacatacagtcatggccaccaaacatgactgacttcagtgttttttctaacctggtgaccattggtggaagagtactctatagtggcctgtccttgcttatcctcaagcaacagggcatcacctctctacagttccagtccctgaaggaaatcagcgcaggaaacatctatattactgacaacagcaacctgtgttattatcataccattaactggacaacactcttcagcacaatcaaccagagaatagtaatccgggacaacagaaaagctgaaaattgtactgctgaaggaatggtgtgcaaccatctgtgttccagtgatggctgttggggacctgggccagaccaatgtctgtcgtgtcgccgcttcagtagaggaaggatctgcatagagtcttgtaacctctatgatggtgaatttcgggagtttgagaatggctccatctgtgtggagtgtgacccccagtgtgagaagatggaagatggcctcctcacatgccatggaccgggtcctgacaactgtacaaagtgctctcattttaaagatggcccaaactgtgtggaaaaatgtccagatggcttacagggggcaaacagtttcattttcaagtatgctgatccagatcgggagtgccacccatgccatccaaactgcacccaagggtgtaacggtcccactagtcatgactgcatttactacccatggacgggccattccactttaccacaacatgctagaactcccctgattgcagctggagtaattggtgggctcttcattctggtcattgtgggtctgacatttgctgtttatgttagaaggaagagcatcaaaaagaaaagagccttgagaagattcttggaaacagagttggtggaaccattaactcccagtggcacagcacccaatcaagctcaacttcgtattttgaaagaaactgagctgaagagggtaaaagtccttggctcaggtgcttttggaacggtttataaaggtatttgggtacctgaaggagaaactgtgaagattcctgtggctattaagattcttaatgagacaactggtcccaaggcaaatgtggagttcatggatgaagctctgatcatggcaagtatggatcatccacacctagtccggttgctgggtgtgtgtctgagcccaaccatccagctggttactcaacttatgccccatggctgcctgttggagtatgtccacgagcacaaggataacattggatcacaactgctgcttaactggtgtgtccagatagctaagggaatgatgtacctggaagaaagacgactcgttcatcgggatttggcagcccgtaatgtcttagtgaaatctccaaaccatgtgaaaatcacagattttgggctagccagactcttggaaggagatgaaaaagagtacaatgctgatggaggaaagatgccaattaaatggatggctctggagtgtatacattacaggaaattcacccatcagagtgacgtttggagctatggagttactatatgggaactgatgacctttggaggaaaaccctatgatggaattccaacgcgagaaatccctgatttattagagaaaggagaacgtttgcctcagcctcccatctgcactattgacgtttacatggtcatggtcaaatgttggatgattgatgctgacagtagacctaaatttaaggaactggctgctgagttttcaaggatggctcgagaccctcaaagatacctagttattcagggtgatgatcgtatgaagcttcccagtccaaatgacagcaagttctttcagaatctcttggatgaagaggatttggaagatatgatggatgctgaggagtacttggtccctcaggctttcaacatcccacctcccatctatacttccagagcaagaattgactcgaataggagtgaaattggacacagccctcctcctgcctacacccccatgtcaggaaaccagtttgtataccgagatggaggttttgctgctgaacaaggagtgtctgtgccctacagagccccaactagcacaattccagaagctcctgtggcacagggtgctactgctgagatttttgatgactcctgctgtaatggcaccctacgcaagccagtggcaccccatgtccaagaggacagtagcacccagaggtacagtgctgaccccaccgtgtttgccccagaacggagcccacgaggagagctggatgaggaaggttacatgactcctatgcgagacaaacccaaacaagaatacctgaatccagtggaggagaacccttttgtttctcggagaaaaaatggagaccttcaagcattggataatcccgaatatcacaatgcatccaatggtccacccaaggccgaggatgagtatgtgaatgagccactgtacctcaacacctttgccaacaccttgggaaaagctgagtacctgaagaacaacatactgtcaatgccagagaaggccaagaaagcgtttgacaaccctgactactggaaccacagcctgccacctcggagcacccttcagcacccagactacctgcaggagtacagcacaaaatatttttataaacagaatgggcggatccggcctattgtggcagagaatcctgaatacctctctgagttctccctgaagccaggcactgtgctgccgcctccaccttacagacaccggaatactgtggtgtaagctcagttgtggttttttaggtggagagacacacctgctccaatttccccacccccctctctttctctggtggtcttccttctaccccaaggccagtagttttgacacttcccagtggaagatacagagatgcaatgatagttatgtgcttacctaacttgaacattagagggaaagactgaaagagaaagataggaggaaccacaatgtttcttcatttctctgcatgggttggtcaggagaatgaaacagctagagaaggaccagaaaatgtaaggcaatgctgcctactatcaaactagctgtcactttttttctttttctttttctttctttgtttctttcttcctcttctttttttttttttttttaaagcagatggttgaaacacccatgctatctgttcctatctgcaggaactgatgtgtgcatatttagcatccctggaaatcataataaagtttccattagaacaaaagaataacattttctataacatatgatagtgtctgaaattgagaatccagtttctttccccagcagtttctgtcctagcaagtaagaatggccaactcaactttcataatttaaaaatctccattaaagttataactagtaattatgttttcaacactttttggtttttttcattttgttttgctctgaccgattcctttatatttgctcccctatttttggctttaatttctaattgcaaagatgtttacatcaaagcttcttcacagaatttaagcaagaaatattttaatatagtgaaatggccactactttaagtatacaatctttaaaataagaaagggaggctaatatttttcatgctatcaaattatcttcaccctcatcctttacatttttcaacatttttttttctccataaatgacactacttgataggccgttggttgtctgaagagtagaagggaaactaagagacagttctctgtggttcaggaaaactactgatactttcaggggtggcccaatgagggaatccattgaactggaagaaacacactggattgggtatgtctacctggcagatactcagaaatgtagtttgcacttaagctgtaattttatttgttctttttctgaactccattttggattttgaatcaagcaatatggaagcaaccagcaaattaactaatttaagtacatttttaaaaaaagagctaagataaagactgtggaaatgccaaaccaagcaaattaggaaccttgcaacggtatccagggactatgatgagaggccagcacattatcttcatatgtcacctttgctacgcaaggaaatttgttcagttcgtatacttcgtaagaaggaatgcgagtaaggattggcttgaattccatggaatttctagtatgagactatttatatgaagtagaaggtaactctttgcacataaattggtataataaaaagaaaaacacaaacattcaaagcttagggataggtccttgggtcaaaagttgtaaataaatgtgaaacatcttctc

SEQ ID NO: 47 - protein, 1308 aa, Homo sapiens
MKPATGLWVWVSLLVAAGTVQPSDSQSVCAGTENKLSSLSDLEQQYRALRKYYENCEVVMGNLEITSIEHNRDLSFLRSVREVTGYVLVALNQFRYLPLENLRIIRGTKLYEDRYALAIFLNYRKDGNFGLQELGLKNLTEILNGGVYVDQNKFLCYADTIHWQDIVRNPWPSNLTLVSTNGSSGCGRCHKSCTGRCWGPTENHCQTLTRTVCAEQCDGRCYGPYVSDCCHRECAGGCSGPKDTDCFACMNFNDSGACVTQCPQTFVYNPTTFQLEHNFNAKYTYGAFCVKKCPHNFVVDSSSCVRACPSSKMEVEENGIKMCKPCTDICPKACDGIGTGSLMSAQTVDSSNIDKFINCTKINGNLIFLVTGIHGDPYNAIEAIDPEKLNVFRTVREITGFLNIQSWPPNMTDFSVFSNLVTIGGRVLYSGLSLLILKQQGITSLQFQSLKEISAGNIYITDNSNLCYYHTINWTTLFSTINQRIVIRDNRKAENCTAEGMVCNHLCSSDGCWGPGPDQCLSCRRFSRGRICIESCNLYDGEFREFENGSICVECDPQCEKMEDGLLTCHGPGPDNCTKCSHFKDGPNCVEKCPDGLQGANSFIFKYADPDRECHPCHPNCTQGCNGPTSHDCIYYPWTGHSTLPQHARTPLIAAGVIGGLFILVIVGLTFAVYVRRKSIKKKRALRRFLETELVEPLTPSGTAPNQAQLRILKETELKRVKVLGSGAFGTVYKGIWVPEGETVKIPVAIKILNETTGPKANVEFMDEALIMASMDHPHLVRLLGVCLSPTIQLVTQLMPHGCLLEYVHEHKDNIGSQLLLNWCVQIAKGMMYLEERRLVHRDLAARNVLVKSPNHVKITDFGLARLLEGDEKEYNADGGKMPIKWMALECIHYRKFTHQSDVWSYGVTIWELMTFGGKPYDGIPTREIPDLLEKGERLPQPPICTIDVYMVMVKCWMIDADSRPKFKELAAEFSRMARDPQRYLVIQGDDRMKLPSPNDSKFFQNLLDEEDLEDMMDAEEYLVPQAFNIPPPIYTSRARIDSNRSEIGHSPPPAYTPMSGNQFVYRDGGFAAEQGVSVPYRAPTSTIPEAPVAQGATAEIFDDSCCNGTLRKPVAPHVQEDSSTQRYSADPTVFAPERSPRGELDEEGYMTPMRDKPKQEYLNPVEENPFVSRRKNGDLQALDNPEYHNASNGPPKAEDEYVNEPLYLNTFANTLGKAEYLKNNILSMPEKAKKAFDNPDYWNHSLPPRSTLQHPDYLQEYSTKYFYKQNGRIRPIVAENPEYLSEFSLKPGTVLPPPPYRHRNTVV

SEQ ID NO: 48 - DNA, 1593 bp, Homo sapiens; identical to SEQ ID NO: 42

SEQ ID NO: 49 - protein, 405 aa, Homo sapiens; identical to SEQ ID NO: 43

SEQ ID NO: 50 - DNA, 990 bp, Homo sapiens
cagtgtgctggcggcccggcgcgagccggcccggccccggtcgggcctccgaaaccatgaactttctgctgtcttgggtgcattggagcctcgccttgctgctctacctccaccatgccaagtggtcccaggctgcacccatggcagaaggaggagggcagaatcatcacgaagtggtgaagttcatggatgtctatcagcgcagctactgccatccaatcgagaccctggtggacatcttccaggagtaccctgatgagatcgagtacatcttcaagccatcctgtgtgcccctgatgcgatgcgggggctgctgcaatgacgagggcctggagtgtgtgcccactgaggagtccaacatcaccatgcagattatgcggatcaaacctcaccaaggccagcacataggagagatgagcttcctacagcacaacaaatgtgaatgcagaccaaagaaagatagagcaagacaagaaaatccctgtgggccttgctcagagcggagaaagcatttgtttgtacaagatccgcagacgtgtaaatgttcctgcaaaaacacagactcgcgttgcaaggcgaggcagcttgagttaaacgaacgtacttgcagatgtgacaagccgaggcggtgagccgggcaggaggaaggagcctccctcagggtttcgggaaccagatctctcaccaggaaagactgatacagaacgatcgatacagaaaccacgctgccgccaccacaccatcaccatcgacagaacagtccttaatccagaaacctgaaatgaaggaagaggagactctgcgcagagcactttgggtccggagggcgagactccggcggaagcattcccgggcgggtgacccagcacggtccctcttggaattggattcgccattttatttttcttgctgctaaatcaccgagcccggaagattagagagttttatttctgggattcctgtagacacaccgcggccgccagcacactg

SEQ ID NO: 51 - protein, 191 aa, Homo sapiens
MNFLLSWVHWSLALLLYLHHAKWSQAAPMAEGGGQNHHEVVKFMDVYQRSYCHPIETLVDIFQEYPDEIEYIFKPSCVPLMRCGGCCNDEGLECVPTEESNITMQIMRIKPHQGQHIGEMSFLQHNKCECRPKKDRARQENPCGPCSERRKHLFVQDPQTCKCSCKNTDSRCKARQLELNERTCRCDKPRR

SEQ ID NO: 52 - DNA, 3166 bp, Homo sapiens
aagagctccagagagaagtcgaggaagagagagacggggtcagagagagcgcgcgggcgtgcgagcagcgaaagcgacaggggcaaagtgagtgacctgcttttgggggtgaccgccggagcgcggcgtgagccctcccccttgggatcccgcagctgaccagtcgcgctgacggacagacagacagacaccgcccccagccccagttaccacctcctccccggccggcggcggacagtggacgcggcggcgagccgcgggcaggggccggagcccgcccccggaggcggggtggagggggtcggagctcgcggcgtcgcactgaaacttttcgtccaacttctgggctgttctcgcttcggaggagccgtggtccgcgcgggggaagccgagccgagcggagccgcgagaagtgctagctcgggccgggaggagccgcagccggaggagggggaggaggaagaagagaaggaagaggagagggggccgcagtggcgactcggcgctcggaagccgggctcatggacgggtgaggcggcggtgtgcgcagacagtgctccagcgcgcgcgctccccagccctggcccggcctcgggccgggaggaagagtagctcgccgaggcgccgaggagagcgggccgccccacagcccgagccggagagggacgcgagccgcgcgccccggtcgggcctccgaaaccatgaactttctgctgtcttgggtgcattggagccttgccttgctgctctacctccaccatgccaagtggtcccaggctgcacccatggcagaaggaggagggcagaatcatcacgaagtggtgaagttcatggatgtctatcagcgcagctactgccatccaatcgagaccctggtggacatcttccaggagtaccctgatgagatcgagtacatcttcaagccatcctgtgtgcccctgatgcgatgcgggggctgctccaatgacgagggcctggagtgtgtgcccactgaggagtccaacatcaccatgcagattatgcggatcaaacctcaccaaggccagcacataggagagatgagcttcctacagcacaacaaatgtgaatgcagaccaaagaaagatagagcaagacaagaaaatccctgtgggccttgctcagagcggagaaagcatttgtttgtacaagatccgcagacgtgtaaatgttcctgcaaaaacacacactcgcgttgcaaggcgaggcagcttgagttaaacgaacgtacttgcagatgtgacaagccgaggcggtgagccgggcaggaggaaggagcctccctcagggtttcgggaaccagatctctctccaggaaagactgatacagaacgatcgatacagaaaccacgctgccgccaccacaccatcaccatcgacagaacagtccttaatccagaaacctgaaatgaaggaagaggagactctgcgcagagcactttgggtccggagggcgagactccggcggaagcattcccgggcgggtgacccagcacggtccctcttggaattggattcgccattttatttttcttgctgctaaatcaccgagcccggaagattagagagttttatttctgggattcctgtagacacacccacccacatacatacatttatatatatatatattatatatatataaaaataaatatctctattttatatatataaaatatatatattctttttttaaattaacagtgctaatgttattggtgtcttcactggatgtatttgactgctgtggacttgagttgggaggggaatgttcccactcagatcctgacagggaagaggaggagatgagagactctggcatgatcttttttttgtcccacttggtggggccagggtcctctcccctgcccaagaatgtgcaaggccagggcatgggggcaaatatgacccagttttgggaacaccgacaaacccagccctggcgctgagcctctctaccccaggtcagacggacagaaagacaaatcacaggttccgggatgaggacaccggctctgaccaggagtttggggagcttcaggacattgctgtgctttggggattccctccacatgctgcacgcgcatctcgcccccaggggcactgcctggaagattcaggagcctgggcggccttcgcttactctcacctgcttctgagttgcccaggaggccactggcagatgtcccggcgaagagaagagacacattgttggaagaagcagcccatgacagcgccccttcctgggactcgccctcatcctcttcctgctccccttcctggggtgcagcctaaaaggacctatgtcctcacaccattgaaaccactagttctgtccccccaggaaacctggttgtgtgtgtgtgagtggttgaccttcctccatcccctggtccttcccttcccttcccgaggcacagagagacagggcaggatccacgtgcccattgtggaggcagagaaaagagaaagtgttttatatacggtacttatttaatatccctttttaattagaaattagaacagttaatttaattaaagagtagggttttttttcagtattcttggttaatatttaatttcaactatttatgagatgtatcttttgctctctcttgctctcttatttgtaccggtttttgtatataaaattcatgtttccaatctctctctccctgatcggtgacagtcactagcttatcttgaacagatatttaattttgctaacactcagctctgccctccccgatcccctggctccccagcacacattcctttgaaagagggtttcaatatacatctacatactatatatatattgggcaacttgtatttgtgtgtatatatatatatatatgtttatgtatatatgtgatcctgaaaaaataaacatcgctattctgttttttatatgttcaaaccaaacaagaaaaaatagagaattctacatactaaatctctctccttttttaattttaatatttgttatcatttatttattggtgctactgtttatccgtaataattgtggggaaaagatattaacatcacgtctttgtctctagtgcagtttttcgagatattccgtagtacatatttatttttaaacaacgacaaagaaatacagatatatcttaaaaaaaaaaaa

SEQ ID NO: 53 - protein, 191 aa, Homo sapiens
MNFLLSWVHWSLALLLYLHHAKWSQAAPMAEGGGQNHHEVVKFMDVYQRSYCHPIETLVDIFQEYPDEIEYIFKPSCVPLMRCGGCSNDEGLECVPTEESNITMQIMRIKPHQGQHIGEMSFLQHNKCECRPKKDRARQENPCGPCSERRKHLFVQDPQTCKCSCKNTHSRCKARQLELNERTCRCDKPRR

SEQ ID NO: 54 - DNA, 725 bp, Homo sapiens
cttcagaagcaatgggaaaaatcagcagtcttccaacccaattatttaagtgctgcttttgtgatttcttgaaggtgaagatgcacaccatgtcctcctcgcatctcttctacctggcgctgtgcctgctcaccttcaccagctctgccacggctggaccggagacgctctgcggggctgagctggtggatgctcttcagttcgtgtgtggagacaggggcttttatttcaacaagcccacagggtatggctccagcagtcggagggcgcctcagacaggtatcgtggatgagtgctgcttccggagctgtgatctaaggaggctggagatgtattgcgcacccctcaagcctgccaagtcagctcgctctgtccgtgcccagcgccacaccgacatgcccaagacccagaaggaagtacatttgaagaacgcaagtagagggagtgcaggaaacaagaactacaggatgtaggaagaccctcctgaggagtgaagagtgacatgccaccgcaggatcctttgctctgcacgagttacctgttaaactttggaacacctaccaaaaaataagtttgataacatttaaaagatgggcgtttcccccaatgaaatacacaagtaaacattccaacattgtctttaggagtgatttgcaccttgcaaaaatggtcctggagttggtagattgctgttgatcttttatcaataatgttctatagaaaag

SEQ ID NO: 55 - protein, 153 aa, Homo sapiens
MGKISSLPTQLFKCCFCDFLKVKMHTMSSSHLFYLALCLLTFTSSATAGPETLCGAELVDALQFVCGDRGFYFNKPTGYGSSSRRAPQTGIVDECCFRSCDLRRLEMYCAPLKPAKSARSVRAQRHTDMPKTQKEVHLKNASRGSAGNKNYRM

SEQ ID NO: 56 - DNA, 8837 bp, Homo sapiens
  misc_feature 238, 239, 733, 3178, 3179, 3180, 3181, 3182, 3183, 3184,3185, 3186, 3187, 3188, 3189, 3190, 3191, 3192, 3193, 3194,3195, 3196, 3197, 3198, 3199, 3200, 3201, 3202, 3203, 7393: n = A,T,C or G
cccaaccccgcgcacagcgggcactggtttcgggcctctctgtctcctacgaagtccgtagagcaactcggatttgggaaatttctctctagcgttgcccaaacacacttgggtcggccgcgcgccctcaggacgtggacagggagggcttccccgtgtccaggaaagcgaccgggcattgcccccagtctcccccaaatttgggcattgtccccgggtcttccaacggactgggcgnngctcccggacactgaggactggccccggggtctcgctcaccttcagcagcgtccaccgcctgccacagagcgttcgatcgctcgctgcctgagctcctggtgcgcccgcggacgcagcctccagcttcgcggtgagctccccgccgcgccgatcccctccgcctctgcgcccctgaccggctctcggcccgcatctgctgctgtcccgccggtgctggcgctcgtccgctgcgccggggaggccggcgtggggcgcgggacacggctgcggacttgcggctgcgctgcgctcgctcctgctgggcgccccgaaatccgcgccactttcgtttgctcattgcaaagatctcatttgtggggaaagcggctggagggtcccaaagtggggcgggcagggggctggggcgagggacgcggaggagaggcgctcccgccgggcggtaaagtgcctctagcccgcgggcctaggactccgccgggagggcgcgcggagngcgaagtgattgatggcggaagcgggggggcaaggggggcaggggggcgcgggattccgccggcgaccccttccccttggctaggcttaggcggcggggggctggcggggtgcgggattttgtgcgtggtttttgacttggtaaaaatcacagtgctttcttacatcgttcaaactctccaggagatggtttccccagacccccaaattatcgtggtggcccccgagaccgaactcgcgtctatgcaagtccaacgcactgaggacggggtaaccattatccagatattttgggtgggccgcaaaggcgagctacttagacgcaccccggtgagctcggccatgcaggtaggatttgagctgtgtttcccgccctgatcctctctcctctggcggccggagcctccgtaggctccaagcctggcccagattcggcggcgcagccggccttccgcgcgtccgcacctagcgggggctccggggctccggcgcggcaccggggggcgctcgggatctggctgaggctccaaggcccgcgtggccggctcctcctgctggggcaggtggcggctgcgcgccccgcccgagcccaggggccccctcagccgcaacaaccagcaaggaccccccgactcagccccaagccacctgcatctgcactcagacggggcgcacccgcagtgcagcctcctggtggggcgctgggagcccgcctgcccctgcctgcccggagaccccagctcacgagcacaggccgcccgggcaccccagaaacccgggatggggcccctgaattctctaggacgggcattcagcatggccttggcgctctgcggctccctgccccccacccagcctcgcccccgcgcaccccccagcccctgcgaccgccgcccccccccccggggccccagggccccagcccgcaccccccgccccgctcttggctcgggttgcgggggcgggccgggggcggggcgagggctccgcgggcgcccattggcgcgggcgcgaggccagcggccccgcgcggccctgggccgcggctggcgcgactataagagccgggcgtgggcgcccgcagttcgcctgctctccggcggagctgcgtgaggcccggccggccccggccccccccttccggccgcccccgcctcctggcccacgcctgcccgcgctctgcccaccagcgcctccatcgggcaaggcggccccgcgtcgacgccgcccgctgcctcgctgctgactcccgtcccgggcgccgtccgcggggtcgcgctccgccgggcctgcggattccccgccgcctcctcttcatctacctcaactccccccatccccgcttcgcccgaggaggcggttccccccgcaggcagtccggctcgcaggccgccggcgttgtcaccccccccgcgctccccctccagccctccccccggcgcgcagcctcgggccgctcccctttccgcgctgcgtcccggagcggccccggtgccgccaccgcctgtccccctcccgaggcccgggctcgcgacggcagagggctccgtcggcccaaaccgagctgggcgcccgcggtccgggtgcagcctccactccgccccccagtcaccgcctcccccggcccctcgacgtggcgcccttccctccgcttctctgtgctccccgcgcccctcttggcgtctggccccggcccccgctctttctcccgcaaccttcccttcgctccctcccgtcccccccagctcctagcctccgactccctccccccctcacgcccgccctctcgccttcgccgaaccaaagtggattaattacacgctttctgtttctctccgtgctgttctctcccgctgtgcgcctgcccgcctctcgctgtcctctctccccctcgccctctcttcggcccccccctttcacgttcactctgtctctcccactatctctgcccccctctatccttgatacaacagctgacctcatttcccgataccttttcccccccgaaaagtacaacatctggcccgccccagcccgaagacagcccgtcctccctggacaatcagacgaattctccccccccccccaaaaaaaagccatccccccgctctgccccgtcgcacattcggcccccgcgactcggccagagcggcgctggcagaggagtgtccggcaggagggccaacgcccgctgttcggtttgcgacacgcagcagggaggtgggcggcagcgtcgccggcttccaggtaagcggcgtgtgcgggccgggccggggccggggctggggcggcgcgggcttgcggcgacgcccggcccttcctccgcccgctcccggcccggggcctgcggggctcggcggggcggctgagccgggggggaggaggaggaggaggaggaggacggacggctgcgggtcccgttccctgcgcggagcccgcgctaccnnnnnnnnnnnnnnnnnnnnnnnnnngacgtccccgctgaagggggtcggtctgtgggtgcagggggtgccgcctcacatgtgtgattcgtgccttgcgggccctggcctccggggtgctgggtaacgaggaggggcgcggagccgcagaagcccaccctggtgtcgttgacgccggtgccagcgagaccgcgagaggaagacgggggcgggcggggccaggatggagaggggccgagttggcaggagtcatggcagacgccacactcgcgaccatctcccccacacccctctggcctctgtccgcaacatttccaaacaggagtcccgggagagggggagaggggctgctggtctgaggctaagaagggcagagccttcgacccggagagaggccgcggccgcctgccccagtggcaacgttgaagttttccatacaacggaggtcgggaaggagaccccccccccccttcactgccctgtgaagagatgagccgggggtgcaggatgggagcccatggcacttcgctacgggatgtccagggctccggttgggggtgcaggagagaagagactggctgggaggagggagagggcgggagcaaaggcgcgggggtgtggtcagagggagaggggtgggggttaggtggagcccgggctgggaggagtcggctcacacataaaactgaggcactgaccagcctgcaaactggatattagcttctcctgtgaaagagacttccagcttcctcctcctcctcttcctcctcctcctcctgccccagcgagccttctgctgagctgtaggtaaccagggctgtggagtgaaggacccccgctgccatcccactccagcctgaggcagggcagcagggggcacggcccacgcctgggcctcgggccctgcagccgccagcccgctgcctctcggacagcacccccctcccctcttttcctctgcccctgcccccacctggcgtctctgctccctcacctgctccttccctttctgttccttcccttcggccccctccttgcccagctcaggacttttcctgggccctcacctgctccgcaccgctgcatgcttcctgtcctgctttctgccggtcccctgacccggacctccaagcgcagagtggtggggcttgttgcggaagcgcggcgagggctagagtggccagctggcggagtgtgctcttagaatttggaagggggtggcagagggggcggtgagaggactggccagggtccgccatgtcaaggagatgaccaaggaggctttcagatcctcggcgcagtcgcccactagtctttagagagggcatgcaaagttgtgcttctgtcccactgcctgctcagtcgctcacataatttattgcatcaaaaactcccctgggtctgcggagcaaggctggggctgcccgcctggagggtaccaccttctgcaggagcagggccaacttgctgtggtggctcccggcctcccacccccgagtgggtaacccggccctgtgacctgcagcctgtggagggggtgtgcctaagactggcctccccttccagattgtagtctggggaacctggtgtcggacttcccaggtggcctgagctggtctcttcagctccacggggagagtttggtagcgcaaatagggagatgttctgggcccctggccttactggttcgatttgaggcctggaaaggaggctctgggcgtgtgtgtgtgtgtttgggggtacccaaggcagactggagttggagaactgggtgactgggaaaacaaggtttctagagcatgggtggcgtggttgtgttaaccattggagtcgcttgacccaggcctggctcagctgcagactggaaaggtggaaaagccagggggaggggcggggctggcccagcaggactggcctgctgctttgagggcgatggtcctcctggaccccccctgctcagctgggggttgtggggaggaaggggctggtcctccttggagcacatgctctgtaggggtggggctgtctgccatcttggcggcgctggaggcctgagaagtggcgatgtaacgctgggctggccctgcccccatggtgtcataggacggaggcaggtcgggtgtccagcctgggcccctgcagctgtggatgccgctgagctcctgcaataatgaccgtgcagatggtcacccctcgtgtaaaattactagtgcttcttgcaaatggaaggaactgggccttttctgtgtgcttctggacgcttcattctgcacatggccctgcgccctcacctcggcattatgacctgtgtgttacttttgtaataaaaataatgtttataggaaagccgtgctttcaattttcaactgaatttgtaggttggcaaatttggtttgggaggggcacctctggcctggggcttggcctggctgccccgctcacgccacttctctcccgcccccagacaccaatgggaatcccaatggggaagtcgatgctggtgcttctcaccttcttggccttcgcctcgtgctgcattgctgcttaccgccccagtgagaccctgtgcggcggggagctggtggacaccctccagttcgtctgtggggaccgcggcttctacttcagtaagtagcagggaggggcttcctcagacctggtcaggcccctagagtgaccggtgaggatctcccatcctcaagccaggggagcacactcctaggtcagcagcccagccgcttgctctgagactttgaccttcccgccgcgtttctgagcacgtgcggtgtcccagggcatccacaccagctgcctttcccatcacacgcctccttcgaagggtgggccagaggtgccccctagacgtcaggggcatctacaggggtctccctgggcatcagaatttctgttgggggccgtgaggctcctgctcctgaggcaccgcacgcctagtgcagggcttcaggctctggaggaagagcctgcctttcttcctgcaccttttggacattttgacaagggacgtgcgttcggtgaatgatcagaattaaaatcaataaagtgatttatataattaaaatcaataagacaagtgcagttggtgggtggcaggggtgagcggtgcatgcgcctccttgggccccaaggctgccgtggggggtgcccacctgctgacctcaaggacgcttcagcctttcctcatgtttctctcttggttctccagcctgggggctggcaggtgggtgcatggcccattgtccttgagaccccacccccagataggggggctgggtggatgcagaggcaggcatggtgcctgggcatgcctgatggggcaggggaggggccgctccttactggcagaggccgcaacttattccacctgacactcaccacgtgacatctttaccaccactgcttactcacgctgtgaaatgggctcacaggatgcaaatgcacttcaaagcttctctctgaaaagttcctgctgcttgactctggaagcccctgcccgccctggcctctcctgtgccctctctcttgcctgccccatttgggggtaggaagtggcactgcagggcctggtgccagccagtccttgcccagggagaagcttccctgcaccaggctttcctgagaggaggggagggccaagcccccacttgggggcccccgtgacggggcctcctgctccctcctccggctgatggcacctgccctttggcaccccaaggtggagcccccagcgaccttccccttccagctgagcattgctgtgggggagagggggaagacgggaggaaagaagggagtggttccatcacgcctcctcagcctcctctcctcccgtcttctcctctcctgcccttgtctccctgtctcagcagctccaggggtggtgtgggcccctccagcctcccaggtggtgccaggccagagtccaagctcacggacagcagtcctcctgtgggggccctgaactgggctcacatcccacacattttccaaaccactcccattgtgagcctttggtcctggtggtgtccctctggttgtgggaccaagagcttgtgcccatttttcatctgaggaaggaggcagcagaagtcacgggctggtctgggccccactcacctcccctctcacctctcttcttcctgggacgcctctgcctgccggctctcacttccctcccctgacccgcagggtggctgcgnccttccagggcctggcctgagggcaggggtggtttgctgggggttcggcctccgggggctgggggtcggtgcggtgctaacacggctctctctgtgctgtgggacttccaggcaggcccgcaagccgtgtgagccgtcgcagccgtggcatcgttgaggagtgctgtttccgcagctgtgacctggccctcctggagacgtactgtgctacccccgccaagtccgagagggacgtgtcgacccctccgaccgtgcttccggtgagggtcctgggcccctttcccactctctagagacagagaaatagggcttcgggcgcccagcgtttcctgtggcctctgggacctcttggccagggacaaggacccgtgacttccttgcttgctgtgtggcccgggagcagctcagacgctggctccttctgtccctctgcccgtggacattagctcaagtcactgatcagtcacaggggtggcctgtcaggtcaggcgggcggctcaggcggaagagcgtggagagcaggcacctgctgaccagccccttcccctcccaggacaacttccccgagatacccctgggcaagttcttccaatatgacacctggaagcagtccacccagcgcctgcgcaggggcctgcctgccctcctgcgtgcccgccggggtcacgtgctcgccaaggagctcgaggcgttcagggaggccaaacgtcaccgtcccctgattgctctacccacccaagaccccgcccacgggggcgcccccccagagatggccagcaatcggaagtgagcaaaactgccgcaagtctgcagcccggcgccaccatcctgcagcctcctcctgaccacggacgtttccatcaggttccatcccgaaaatctctcggttccacgtcccctggggcttctcctgacccagtccccgtgccccgcctccccgaaacaggctactctcctcggccccctccatcgggctgaggaagcacagcagcatcttcaaacatgtacaaaatcgattggctttaaacacccttcacataccctccccccaaattatccccaattatccccacacataaaaaatcaaaacattaaactaacccccttcccccccccccacaacaaccctcttaaaactaattggctttttagaaacaccccacaaaagctcagaaattggctttaaaaaaaacaaccaccaaaaaaaatcaattggctaaaaaaaaaaagtattaaaaacgaattggctgagaaacaattggcaaaataaaggaatttggcactccccacccccctctttctcttctcccttggactttgagtcaaattggcctggacttgagtccctgaaccagcaaagagaaaagaagggccccagaaatcacaggtgggcacgtcgcgtctaccgccatctcccttctcacgggaattttcagggtaaact

SEQ ID NO: 57 - protein, 180 aa, Homo sapiens [sequence omitted]

SEQ ID NO: 58 - DNA, 5010 bp, Homo sapiens
ggcggctcgggacggaggacgcgctagtgtgagtgcgggcttctagaactacaccgaccctcgtgtcctcccttcatcctgcggggctggctggagcggccgctccggtgctgtccagcagccatagggagccgcacggggagcgggaaagcggtcgcggccccaggcggggcggccgggatggagcggggccgcgagcctgtggggaaggggctgtggcggcgcctcgagcggctgcaggttcttctgtgtggcagttcagaatgatggatcaagctagatcagcattctctaacttgtttggtggagaaccattgtcatatacccggttcagcctggctcggcaagtagatggcgataacagtcatgtggagatgaaacttgctgtagatgaagaagaaaatgctgacaataacacaaaggccaatgtcacaaaaccaaaaaggtgtagtggaagtatctgctatgggactattgctgtgatcgtctttttcttgattggatttatgattggctacttgggctattgtaaaggggtagaaccaaaaactgagtgtgagagactggcaggaaccgagtctccagtgagggaggagccaggagaggacttccctgcagcacgtcgcttatattgggatgacctgaagagaaagttgtcggagaaactggacagcacagacttcaccagcaccatcaagctgctgaatgaaaattcatatgtccctcgtgaggctggatctcaaaaagatgaaaatcttgcgttgtatgttgaaaatcaatttcgtgaatttaaactcagcaaagtctggcgtgatcaacattttgttaagattcaggtcaaagacagcgctcaaaactcggtgatcatagttgataagaacggtagacttgtttacctggtggagaatcctgggggttatgtggcgtatagtaaggctgcaacagttactggtaaactggtccatgctaattttggtactaaaaaagattttgaggatttatacactcctgtgaatggatctatagtgattgtcagagcagggaaaatcacctttgcagaaaaggttgcaaatgctgaaagcttaaatgcaattggtgtgttgatatacatggaccagactaaatttcccattgttaacgcagaactttcattctttggacatgctcatctggggacaggtgacccttacacacctggattcccttccttcaatcacactcagtttccaccatctcggtcatcaggattgcctaatatacctgtccagacaatctccagagctgctgcagaaaagctgtttgggaatatggaaggagactgtccctctgactggaaaacagactctacatgtaggatggtaacctcagaaagcaagaatgtgaagctcactgtgagcaatgtgctgaaagagataaaaattcttaacatctttggagttattaaaggctttgtagaaccagatcactatgttgtagttggggcccagagagatgcatggggccctggagctgcaaaatccggtgtaggcacagctctcctattgaaacttgcccagatgttctcagatatggtcttaaaagatgggtttcagcccagcagaagcattatctttgccagttggagtgctggagactttggatcggttggtgccactgaatggctagagggatacctttcgtccctgcatttaaaggctttcacttatattaatctggataaagcggttcttggtaccagcaacttcaaggtttctgccagcccactgttgtatacgcttattgagaaaacaatgcaaaatgtgaagcatccggttactgggcaatttctatatcaggacagcaactgggccagcaaagttgagaaactcactttagacaatgctgctttccctttccttgcatattctggaatcccagcagtttctttctgtttttgcgaggacacagattatccttatttgggtaccaccatggacacctataaggaactgattgagaggattcctgagttgaacaaagtggcacgagcagctgcagaggtcgctggtcagttcgtgattaaactaacccatgatgttgaattgaacctggactatgagaggtacaacagccaactgctttcatttgtgagggatctgaaccaatacagagcagacataaaggaaatgggcctgagtttacagtggctgtattctgctcgtggagacttcttccgtgctacttccagactaacaacagatttcgggaatgctgagaaaacagacagatttgtcatgaagaaactcaatgatcgtgtcatgagagtggagtatcacttcctctctccctacgtatctccaaaagagtctcctttccgacatgtcttctggggctccggctctcacacgctgccagctttactggagaacttgaaactgcgtaaacaaaataacggtgcttttaatgaaacgctgttcagaaaccagttggctctagctacttggactattcagggagctgcaaatgccctctctggtgacgtttgggacattgacaatgagttttaaatgtgatacccatagcttccatgagaacagcagggtagtctggtttctagacttgtgctgatcgtgctaaattttcagtagggctacaaaacctgatgttaaaattccatcccatcatcttggtactactagatgtctttaggcagcagcttttaatacagggtagataacctgtacttcaagttaaagtgaataaccacttaaaaaatgtccatgatggaatattcccctatctctagaattttaagtgctttgtaatgggaactgcctctttcctgttgttgttaatgaaaatgtcagaaaccagttatgtgaatgatctctctgaatcctaagggctggtctctgctgaaggttgtaagtggttcgcttactttgagtgatcctccaacttcatttgatgctaaataggagataccaggttgaaagacctctccaaatgagatctaagcctttccataaggaatgtagcaggtttcctcattcctgaaagaaacagttaactttcagaagagatgggcttgttttcttgccaatgaggtctgaaatggaggtccttctgctggataaaatgaggttcaactgttgattgcaggaataaggccttaatatgttaacctcagtgtcatttatgaaaagaggggaccagaagccaaagacttagtatattttcttttcctctgtcccttcccccataagcctccatttagttctttgttatttttgtttcttccaaagcacattgaaagagaaccagtttcaggtgtttagttgcagactcagtttgtcagactttaaagaataatatgctgccaaattttggccaaagtgttaatcttaggggagagctttctgtccttttggcactgagatatttattgtttatttatcagtgacagagttcactataaatggtgtttttttaatagaatataattatcggaagcagtgccttccataattatgacagttatactgtcggttttttttaaataaaagcagcatctgctaataaaacccaacagatactggaagttttgcatttatggtcaacacttaagggttttagaaaacagccgtcagccaaatgtaattgaataaagttgaagctaagatttagagatgaattaaatttaattaggggttgctaagaagcgagcactgaccagataagaatgctggttttcctaaatgcagtgaattgtgaccaagttataaatcaatgtcacttaaaggctgtggtagtactcctgcaaaattttatagctcagtttatccaaggtgtaactctaattcccatttgcaaaatttccagtacctttgtcacaatcctaacacattatcgggagcagtgtcttccataatgtataaagaacaaggtagtttttacctaccacagtgtctgtatcggagacagtgatctccatatgttacactaagggtgtaagtaattatcgggaacagtgtttcccataattttcttcatgcaatgacatcttcaaagcttgaagatcgttagtatctaacatgtatcccaactcctataattccctatcttttagttttagttgcagaaacattttgtggtcattaagcattgggtgggtaaattcaaccactgtaaaatgaaattactacaaaatttgaaatttagcttgggtttttgttacctttatggtttctccaggtcctctacttaatgagatagcagcatacatttataatgtttgctattgacaagtcattttaatttatcacattatttgcatgttacctcctataaacttagtgcggacaagttttaatccagaattgaccttttgacttaaagcagagggactttgtatagaaggtttgggggctgtggggaaggagagtcccctgaaggtctgacacgtctgcctacccattcgtggtgatcaattaaatgtaggtatgaataagttcgaagctccgtgagtgaaccatcatataaacgtgtagtacagctgtttgtcatagggcagttggaaacggcctcctagggaaaagttcatagggtctcttcaggttcttagtgtcacttacctagatttacagcctcacttgaatgtgtcactactcacagtctctttaatcttcagttttatctttaatctcctcttttatcttggactgacatttagcgtagctaagtgaaaaggtcatagctgagattcctggttcgggtgttacgcacacgtacttaaatgaaagcatgtggcatgttcatcgtataacacaatatgaatacagggcatgcattttgcagcagtgagtctcttcagaaaacccttttctacagttagggttgagttacttcctatcaagccagtacgtgctaacaggctcaatattcctgaatgaaatatcagactagtgacaagctcctggtcttgagatgtcttctcgttaaggagtagggccttttggaggtaaaggtata

SEQ ID NO: 59 - protein, 760 aa, Homo sapiens
MMDQARSAFSNLFGGEPLSYTRFSLARQVDGDNSHVEMKLAVDEEENADNNTKANVTKPKRCSGSICYGTIAVIVFFLIGFMIGYLGYCKGVEPKTECERLAGTESPVREEPGEDFPAARRLYWDDLKRKLSEKLDSTDFTSTIKLLNENSYVPREAGSQKDENLALYVENQFREFKLSKVWRDQHFVKIQVKDSAQNSVIIVDKNGRLVYLVENPGGYVAYSKAATVTGKLVHANFGTKKDFEDLYTPVNGSIVIVRAGKITFAEKVANAESLNAIGVLIYMDQTKFPIVNAELSFFGHAHLGTGDPYTPGFPSFNHTQFPPSRSSGLPNIPVQTISRAAAEKLFGNMEGDCPSDWKTDSTCRMVTSESKNVKLTVSNVLKEIKILNIFGVIKGFVEPDHYVVVGAQRDAWGPGAAKSGVGTALLLKLAQMFSDMVLKDGFQPSRSIIFASWSAGDFGSVGATEWLEGYLSSLHLKAFTYINLDKAVLGTSNFKVSASPLLYTLIEKTMQNVKHPVTGQFLYQDSNWASKVEKLTLDNAAFPFLAYSGIPAVSFCFCEDTDYPYLGTTMDTYKELIERIPELNKVARAAAEVAGQFVIKLTHDVELNLDYERYNSQLLSFVRDLNQYRADIKEMGLSLQWLYSARGDFFRATSRLTTDFGNAEKTDRFVMKKLNDRVMRVEYHFLSPYVSPKESPFRHVFWGSGSHTLPALLENLKLRKQNNGAFNETLFRNQLALATWTIQGAANALSGDVWDIDNEF

SEQ ID NO: 60 - DNA, 6450 bp, Homo sapiens
gagttgtgcctggagtgatgtttaagccaatgtcagggcaaggcaacagtccctggccgtcctccagcacctttgtaatgcatatgagctcgggagaccagtacttaaagttggaggcccgggagcccaggagctggcggagggcgttcgtcctgggagctgcacttgctccgtcgggtcgccggcttcaccggaccgcaggctcccggggcagggccggggccagagctcgcgtgtcggcgggacatgcgctgcgtcgcctctaacctcgggctgtgctctttttccaggtggcccgccggtttctgagccttctgccctgcggggacacggtctgcaccctgcccgcggccacggaccatgaccatgaccctccacaccaaagcatctgggatggccctactgcatcagatccaagggaacgagctggagcccctgaaccgtccgcagctcaagatccccctggagcggcccctgggcgaggtgtacctggacagcagcaagcccgccgtgtacaactaccccgagggcgccgcctacgagttcaacgccgcggccgccgccaacgcgcaggtctacggtcagaccggcctcccctacggccccgggtctgaggctgcggcgttcggctccaacggcctggggggtttccccccactcaacagcgtgtctccgagcccgctgatgctactgcacccgccgccgcagctgtcgcctttcctgcagccccacggccagcaggtgccctactacctggagaacgagcccagcggctacacggtgcgcgaggccggcccgccggcattctacaggccaaattcagataatcgacgccagggtggcagagaaagattggccagtaccaatgacaagggaagtatggctatggaatctgccaaggagactcgctactgtgcagtgtgcaatgactatgcttcaggctaccattatggagtctggtcctgtgagggctgcaaggccttcttcaagagaagtattcaaggacataacgactatatgtgtccagccaccaaccagtgcaccattgataaaaacaggaggaagagctgccaggcctgccggctccgcaaatgctacgaagtgggaatgatgaaaggtgggatacgaaaagaccgaagaggagggagaatgttgaaacacaagcgccagagagatgatggggagggcaggggtgaagtggggtctgctggagacatgagagctgccaacctttggccaagcccgctcatgatcaaacgctctaagaagaacagcctggccttgtccctgacggccgaccagatggtcagtgccttgttggatgctgagccccccatactctattccgagtatgatcctaccagacccttcagtgaagcttcgatgatgggcttactgaccaacctggcagacagggagctggttcacatgatcaactgggcgaagagggtgccaggctttgtggatttgaccctccatgatcaggtccaccttctagaatgtgcctggctagagatcctgatgattggtctcgtctggcgctccatggagcacccagtgaagctactgtttgctcctaacttgctcttggacaggaaccagggaaaatgtgtagagggcatggtggagatcttcgacatgctgctggctacatcatctcggttccgcatgatgaatctgcagggagaggagtttgtgtgcctcaaatctattattttgcttaattctggagtgtacacatttctgtccagcaccctgaagtctctggaagagaaggaccatatccaccgagtcctggacaagatcacagacactttgatccacctgatggccaaggcaggcctgaccctgcagcagcagcaccagcggctggcccagctcctcctcatcctctcccacatcaggcacatgagtaacaaaggcatggagcatctgtacagcatgaagtgcaagaacgtggtgcccctctatgacctgctgctggagatgctggacgcccaccgcctacatgcgcccactagccgtggaggggcatccgtggaggagacggaccaaagccacttggccactgcgggctctacttcatcgcattccttgcaaaagtattacatcacgggggaggcagagggtttccctgccacagtctgagagctccctggctcccacacggttcagataatccctgctgcattttaccctcatcatgcaccactttagccaaattctgtctcctgcatacactccggcatgcatccaacaccaatggctttctagatgagtggccattcatttgcttgctcagttcttagtggcacatcttctgtcttctgttgggaacagccaaagggattccaaggctaaatctttgtaacagctctctttcccccttgctatgttactaagcgtgaggattcccgtagctcttcacagctgaactcagtctatgggttggggctcagataactctgtgcatttaagctacttgtagagacccaggcctggagagtagacattttgcctctgataagcactttttaaatggctctaagaataagccacagcaaagaatttaaagtggctcctttaattggtgacttggagaaagctaggtcaagggtttattatagcaccctcttgtattcctatggcaatgcatccttttatgaaagtggtacaccttaaagcttttatatgactgtagcagagtatctggtgattgtcaattcacttccccctataggaatacaaggggccacacagggaaggcagatcccctagttggccaagacttattttaacttgatacactgcagattcagagtgtcctgaagctctgcctctggctttccggtcatgggttccagttaattcatgcctcccatggacctatggagagcaacaagttgatcttagttaagtctccctatatgagggataagttcctgatttttgtttttatttttgtgttacaaaagaaagccctccctccctgaacttgcagtaaggtcagcttcaggacctgttccagtgggcactgtacttggatcttcccggcgtgtgtgtgccttacacaggggtgaactgttcactgtggtgatgcatgatgagggtaaatggtagttgaaaggagcaggggccctggtgttgcatttagccctggggcatggagctgaacagtacttgtgcaggattgttgtggctactagagaacaagagggaaagtagggcagaaactggatacagttctgagcacagccagacttgctcaggtggccctgcacaggctgcagctacctaggaacattccttgcagaccccgcattgcctttgggggtgccctgggatccctggggtagtccagctcttattcatttcccagcgtggccctggttggaagaagcagctgtcaagttgtagacagctgtgttcctacaattggcccagcaccctggggcacgggagaagggtggggaccgttgctgtcactactcaggctgactggggcctggtcagattacgtatgcccttggtggtttagagataatccaaaatcagggtttggtttggggaagaaaatcctcccccttcctcccccgccccgttccctaccgcctccactcctgccagctcatttccttcaatttcctttgacctataggctaaaaaagaaaggctcattccagccacagggcagccttccctgggcctttgcttctctagcacaattatgggttacttcctttttcttaacaaaaaagaatgtttgatttcctctgggtgaccttattgtctgtaattgaaaccctattgagaggtgatgtctgtgttagccaatgacccaggtagctgctcgggcttctcttggtatgtcttgtttggaaaagtggatttcattcatttctgattgtccagttaagtgatcaccaaaggactgagaatctgggagggcaaaaaaaaaaaaaaaagtttttatgtgcacttaaatttggggacaattttatgtatctgtgttaaggatatgcttaagaacataattcttttgttgctgtttgtttaagaagcaccttagtttgtttaagaagcaccttatatagtataatatatatttttttgaaattacattgcttgtttatcagacaattgaatgtagtaattctgttctggatttaatttgactgggttaacatgcaaaaaccaaggaaaaatatttagtttttttttttttttttgtatacttttcaagctaccttgtcatgtatacagtcatttatgcctaaagcctggtgattattcatttaaatgaagatcacatttcatatcaacttttgtatccacagtagacaaaatagcactaatccagatgcctattgttggatattgaatgacagacaatcttatgtagcaaagattatgcctgaaaaggaaaattattcagggcagctaattttgcttttaccaaaatatcagtagtaatatttttggacagtagctaatgggtcagtgggttctttttaatgtttatacttagattttcttttaaaaaaattaaaataaaacaaaaaaaatttctaggactagacgatgtaataccagctaaagccaaacaattatacagtggaaggttttacattattcatccaatgtgtttctattcatgttaagatactactacatttgaagtgggcagagaacatcagatgattgaaatgttcgcccaggggtctccagcaactttggaaatctctttgtatttttacttgaagtgccactaatggacagcagatattttctggctgatgttggtattgggtgtaggaacatgatttaaaaaaaaaactcttgcctctgctttcccccactctgaggcaagttaaaatgtaaaagatgtgatttatctggggggctcaggtatggtggggaagtggattcaggaatctggggaatggcaaatatattaagaagagtattgaaagtatttggaggaaaatggttaattctgggtgtgcaccaaggttcagtagagtccacttctgccctggagaccacaaatcaactagctccatttacagccatttctaaaatggcagcttcagttctagagaagaaagaacaacatcagcagtaaagtccatggaatagctagtggtctgtgtttcttttcgccattgcctagcttgccgtaatgattctataatgccatcatgcagcaattatgagaggctaggtcatccaaagagaagaccctatcaatgtaggttgcaaaatctaacccctaaggaagtgcagtctttgatttgatttccctagtaaccttgcagatatgtttaaccaagccatagcccatgccttttgagggctgaacaaataagggacttactgataatttacttttgatcacattaaggtgttctcaccttgaaatcttatacactgaaatggccattgatttaggccactggcttagagtactccttcccctgcatgacactgattacaaatactttcctattcatactttccaattatgagatggactgtgggtactgggagtgatcactaacaccatagtaatgtctaatattcacaggcagatctgcttggggaagctagttatgtgaaaggcaaataaagtcatacagtagctcaaaaggcaaccataattctctttggtgcaagtcttgggagcgtgatctagattacactgcaccattcccaagttaatcccctgaaaacttactctcaactggagcaaatgaactttggtcccaaatatccatcttttcagtagcgttaattatgctctgtttccaactgcatttcctttccaattgaattaaagtgtggcctcgtttttagtcatttaaaattgttttctaagtaattgctgcctctattatggcacttcaattttgcactgtcttttgagattcaagaaaaatttctattcatttttttgcatccaattgtgcctgaacttttaaaatatgtaaatgctgccatgttccaaacccatcgtcagtgtgtgtgtttagagctgtgcaccctagaaacaacatacttgtcccatgagcaggtgcctgagacacagacccctttgcattcacagagaggtcattggttatagagacttgaattaataagtgacattatgccagtttctgttctctcacaggtgataaacaatgctttttgtgcactacatactcttcagtgtagagctcttgttttatgggaaaaggctcaaatgccaaattgtgtttgatggattaatatgcccttttgccgatgcatactattactgatgtgactcggttttgtcgcagctttgctttgtttaatgaaacacacttgtaaacctcttttgcactttgaaaaagaatccagcgggatgctcgagcacctgtaaacaattttctcaacctatttgatgttcaaataaagaattaaact

SEQ ID NO: 61 - protein, 595 aa, Homo sapiens
MTMTLHTKASGMALLHQIQGNELEPLNRPQLKIPLERPLGEVYLDSSKPAVYNYPEGAAYEFNAAAAANAQVYGQTGLPYGPGSEAAAFGSNGLGGFPPLNSVSPSPLMLLHPPPQLSPFLQPHGQQVPYYLENEPSGYTVREAGPPAFYRPNSDNRRQGGRERLASTNDKGSMAMESAKETRYCAVCNDYASGYHYGVWSCEGCKAFFKRSIQGHNDYMCPATNQCTIDKNRRKSCQACRLRKCYEVGMMKGGIRKDRRGGRMLKHKRQRDDGEGRGEVGSAGDMRAANLWPSPLMIKRSKKNSLALSLTADQMVSALLDAEPPILYSEYDPTRPFSEASMMGLLTNLADRELVHMINWAKRVPGFVDLTLHDQVHLLECAWLEILMIGLVWRSMEHPVKLLFAPNLLLDRNQGKCVEGMVEIFDMLLATSSRFRMMNLQGEEFVCLKSIILLNSGVYTFLSSTLKSLEEKDHIHRVLDKITDTLIHLMAKAGLTLQQQHQRLAQLLLILSHIRHMSNKGMEHLYSMKCKNVVPLYDLLLEMLDAHRLHAPTSRGGASVEETDQSHLATAGSTSSHSLQKYYITGEAEGFPATV

SEQ ID NO: 62 - DNA, 5003 bp, Homo sapiens
ggatccattttataagctcaaagataattacttttcagactaagaatatttagggtaaaaagtactgttcaacatctctactgaggatgttatgatgtagcacactctataagctggagctaaaggaaactttccttaaagtgctatttactaaaaattggaacacattccttaagacaaatcgaagtgtggcacacaacatccaaacttccatcatagatacagaggtgttaccatctcccactcccaaatttctttgtcacgctgaggatactcaagaggagcaggacatgttggtcgcagcaggagaaacttgaaagcattcacttttatggaactcataagggagagaatctcttatttagtatcgtccttgatacatttattattttaaaagataatgtagccaaatgtcttcctctgtgttaaatctttacaaaactgaaatcttaaaatggtgacaaaaattctacttctgatagaatctattcatttttccaattagatagggcataattcttaatttgcaaaacaaaacgtaatatgcttatgaggttccatcccaaagaacctgctattgagagtagcattcagaataacgggtggaaatgccaactccagagtttcagatcctaccggtaattggggtagggaggggctttgggcggggcctccctagaggaggaggcgttgttagaaagctgtctggccagtccacagctgtcactaatcggggtaagccttgttgtatttgcgcgtgtgggtggcattctcaatgagaactagcttcacttgtcatttgagtgaaatctacaacccgaggcggctagtgctcccgcactactgggatctgagatcttcggagatgactgtcgcccgcagtacggagccagcagaagtccgacccttcctgggaatgggctgtaccgagaggtccgactagccccagggttttagtgagggggcagtggaactcagcgagggactgagagcttcacagcatgcacgagtttgatgccagagaaaaagtcgggagataaaggagccgcgtgtcactaaattgccgtcgcagccgcagccactcaagtgccggacttgtgagtactctgcgtctccagtcctcggacagaagttggagaactctcttggagaactccccgagttaggagacgagatctcctaacaattactactttttcttgcgctccccacttgccgctcgctgggacaaacgacagccacagttcccctgacgacaggatggaggccaagggcaggagctgaccagcgccgccctcccccgcccccgacccaggaggtggagatcctccggtccagccacattcaacacccactttctcctccctctgcccctatattcccgaaaccccctcctccttcccttttccctcctccctggagacgggggaggagaaaaggggagtccagtcgtcatgactgagctgaaggcaaagggtccccgggctccccacgtggcgggcggcccgccctcccccgaggtcggatccccactgctgtgtcgcccagccgcaggtccgttcccggggagccagacctcggacaccttgcctgaagtttcggccatacctatctccctggacgggctactcttccctcggccctgccagggacaggacccctccgacgaaaagacgcaggaccagcagtcgctgtcggacgtggagggcgcatattccagagctgaagctacaaggggtgctggaggcagcagttctagtcccccagaaaaggacagcggactgctggacagtgtcttggacactctgttggcgccctcaggtcccgggcagagccaacccagccctcccgcctgcgaggtcaccagctcttggtgcctgtttggccccgaacttcccgaagatccaccggctgcccccgccacccagcgggtgttgtccccgctcatgagccggtccgggtgcaaggttggagacagctccgggacggcagctgcccataaagtgctgccccggggcctgtcaccagcccggcagctgctgctcccggcctctgagagccctcactggtccggggccccagtgaagccgtctccgcaggccgctgcggtggaggttgaggaggaggatagctctgagtccgaggagtctgcgggtccgcttctgaagggcaaacctcgggctctgggtggcgcggcggctggaggaggagccgcggcttgtccgccgggggcggcagcaggaggcgtcgccctggtccccaaggaagattcccgcttctcagcgcccagggtcgccctggtggagcaggacgcgccgatggcgcccgggcgctccccgctggccaccacggtgatggatttcatccacgtgcctatcctgcctctcaatcacgccttattggcagcccgcactcggcagctgctggaagacgaaagttacgacggcggggccggggctgccagcgcctttgccccgccgcggacttcaccctgtgcctcgtccaccccggtcgctgtaggcgacttccccgactgcgcgtacccgcccgacgccgagcccaaggacgacgcgtaccctctctatagcgacttccagccgcccgctctaaagataaaggaggaggaggaaggcgcggaggcctccgcgcgctccccgcgttcctaccttgtggccggtgccaaccccgcagccttcccggatttcccgttggggccaccgcccccgctgccgccgcgagcgaccccatccagacccggggaagcggcggtgacggccgcacccgccagtgcctcagtctcgtctgcgtcctcctcggggtcgaccctggagtgcatcctgtacaaagcggagggcgcgccgccccagcagggcccgttcgcgccgccgccctgcaaggcgccgggcgcgagcggctgcctgctcccgcgggacggcctgccctccacctccgcctctgccgccgccgccggggcggcccccgcgctctaccctgcactcggcctcaacgggctcccgcagctcggctaccaggccgccgtgctcaaggagggcctgccgcaggtctacccgccctatctcaactacctgaggccggattcagaagccagccagagcccacaatacagcttcgagtcattacctcagaagatttgtttaatctgtggggatgaagcatcaggctgtcattatggtgtccttacctgtgggagctgtaaggtcttctttaagagggcaatggaagggcagcacaactacttatgtgctggaagaaatgactgcatcgttgataaaatccgcagaaaaaactgcccagcatgtcgccttagaaagtgctgtcaggctggcatggtccttggaggtcgaaaatttaaaaagttcaataaagtcagagttgtgagagcactggatgctgttgctctcccacagccattgggcgttccaaatgaaagccaagccctaagccagagattcactttttcaccaggtcaagacatacagttgattccaccactgatcaacctgttaatgagcattgaaccagatgtgatctatgcaggacatgacaacacaaaacctgacacctccagttctttgctgacaagtcttaatcaactaggcgagaggcaacttctttcagtagtcaagtggtctaaatcattgccaggttttcgaaacttacatattgatgaccagataactctcattcagtattcttggatgagcttaatggtgtttggtctaggatggagatcctacaaacatgtcagtgggcagatgctgtattttgcacctgatctaatactaaatgaacagcggatgaaagaatcatcattctattcattatgccttaccatgtggcagatcccacaggagtttgtcaagcttcaagttagccaagaagagttcctctgtatgaaagtattgttacttcttaatacaattcctttggaagggctacgaagtcaaacccagtttgaggagatgaggtcaagctacattagagagctcatcaaggcaattggtttgaggcaaaaaggagttgtgtcgagctcacagcgtttctatcaacttacaaaacttcttgataacttgcatgatcttgtcaaacagcttcatctgtactgcttgaatacatttatccagtcccgggcactgagtgttgaatttccagaaatgatgtctgaagttattgctgcacaattacccaagatattggcagggatggtgaaaccccttctctttcataaaaagtgaatgtcatctttttcttttaaagaattaaattttgtggcatgtctttttgttttggtcaggattatgaggtcttgagtttttataatgttcttctgaaagccttacatttataacatcatagtgtgtaaatttaaaagaaaaattgtgaggttctaattattttcttttataaagtataattagaatgtttaactgttttgtttacccatattttcttgaagaatttacaagattgaaaaagtactaaaattgttaaagtaaactatatcttatccatattatttcataccatgtaggtgaggatttttaacttttgcatctaacaaatcatcgacttaagagaaaaaatcttacatgtaataacacaaagctattatatgttatttctaggtaactccctttgtgtcaattatatttccaaaaatgaacctttaaaatggtatgcaaaattttgtctatatatatttgtgtgaggaggaaattcataactttcctcagattttcaaaagtatttttaatgcaaaaaatgtagaaagagtttaaaaccactaaaatagattgatgttcttcaaactaggcaaaacaactcatatgttaagaccattttccagattggaaacacaaatctcttaggaagttaataagtagattcatatcattatacaaatagtattgtgggttttgtaggtttttaaaataaccttttttggggagagaattgtcctctaatgaggtattgcgagtggc

SEQ ID NO: 63 - protein, 933 aa, Homo sapiens
MTELKAKGPRAPHVAGGPPSPEVGSPLLCRPAAGPFPGSQTSDTLPEVSAIPISLDGLLFPRPCQGQDPSDEKTQDQQSLSDVEGAYSRAEATRGAGGSSSSPPEKDSGLLDSVLDTLLAPSGPGQSQPSPPACEVTSSWCLFGPELPEDPPAAPATQRVLSPLMSRSGCKVGDSSGTAAAHKVLPRGLSPARQLLLPASESPHWSGAPVKPSPQAAAVEVEEEDSSESEESAGPLLKGKPRALGGAAAGGGAAACPPGAAAGGVALVPKEDSRFSAPRVALVEQDAPMAPGRSPLATTVMDFIHVPILPLNHALLAARTRQLLEDESYDGGAGAASAFAPPRTSPCASSTPVAVGDFPDCAYPPDAEPKDDAYPLYSDFQPPALKIKEEEEGAEASARSPRSYLVAGANPAAFPDFPLGPPPPLPPRATPSRPGEAAVTAAPASASVSSASSSGSTLECILYKAEGAPPQQGPFAPPPCKAPGASGCLLPRDGLPSTSASAAAAGAAPALYPALGLNGLPQLGYQAAVLKEGLPQVYPPYLNYLRPDSEASQSPQYSFESLPQKICLICGDEASGCHYGVLTCGSCKVFFKRAMEGQHNYLCAGRNDCIVDKIRRKNCPACRLRKCCQAGMVLGGRKFKKFNKVRVVRALDAVALPQPLGVPNESQALSQRFTFSPGQDIQLIPPLINLLMSIEPDVIYAGHDNTKPDTSSSLLTSLNQLGERQLLSVVKWSKSLPGFRNLHIDDQITLIQYSWMSLMVFGLGWRSYKHVSGQMLYFAPDLILNEQRMKESSFYSLCLTMWQIPQEFVKLQVSQEEFLCMKVLLLLNTIPLEGLRSQTQFEEMRSSYIRELIKAIGLRQKGVVSSSQRFYQLTKLLDNLHDLVKQLHLYCLNTFIQSRALSVEFPEMMSEVIAAQLPKILAGMVKPLLFHKK

SEQ ID NO: 64 - DNA, 2393 bp, Homo sapiens
cgctgagatctgtggaggtttttctctgcaaatgcagaaagaaatcaggtggatggatgcataattatggccctgctcctggtctctttgctggcattcctgagcttgggctcaggatgtcatcatcggatctgtcactgctctaacagggtttttctctgccaagagagcaaggtgacagagattccttctgacctcccgaggaatgccattgaactgaggtttgtcctcaccaagcttcgagtcatccaaaaaggtgcattttcaggatttggggacctggagaaaatagagatctctcagaatgatgtcttggaggtgatagaggcagatgtgttctccaaccttcccaaattacatgaaattagaattgaaaaggccaacaacctgctctacatcacccctgaggccttccagaaccttcccaaccttcaatatctgttaatatccaacacaggtattaagcaccttccagatgttcacaagattcattctctccaaaaggttttacttgacattcaagataacataaacatccacacaattgaaagaaattctttcgtggggctgagctttgaaagtgtgattctatggctgaataagaatgggattcaagaaatacacaactgtgcattcaatggaacccaactagatgcagtgaatctaagcgataataataatttagaagaattgcctaatgatgttttccacggagcctctggaccagtcattctagatatttcaagaacaaggatccattccctgcctagctatggcttagaaaatcttaagaagctgagggccaggtcgacttacaacttaaaaaagctgcctactctggaaaagcttgtcgccctcatggaagccagcctcacctatcccagccattgctgtgcctttgcaaactggagacggcaaatctctgagcttcatccaatttgcaacaaatctattttaaggcaagaagttgattatatgactcaggctaggggtcagagatcctctctggcagaagacaatgagtccagctacagcagaggatttgacatgacgtacactgagtttgactatgacttatgcaatgaagtggttgacgtgacctgctcccctaagccagatgcattcaacccatgtgaagatatcatggggtacaacatcctcagagtcctgatatggtttatcagcatcctggccatcactgggaacatcatagtgctagtgatcctaactaccagccaatataaactcacagtccccaggttccttatgtgcaacctggcctttgctgatctctgcattggaatctacctgctgctcattgcatcagttgatatccataccaagagccaatatcacaactatgccattgactggcaaactggggcaggctgtgatgctgctggctttttcactgtctttgccagtgagctgtcagtctacactctgacagctatcaccttggaaagatggcataccatcacgcatgccatgcagctggactgcaaggtgcagctccgccatgctgccagtgtcatggtgatgggctggatttttgcttttgcagctgccctctttcccatctttggcatcagcagctacatgaaggtgagcatctgcctgcccatggatattgacagccctttgtcacagctgtatgtcatgtccctccttgtgctcaatgtcctggcctttgtggtcatctgtggctgctatatccacatctacctcacagtgcggaaccccaacatcgtgtcctcctctagtgacaccaggatcgccaagcgcatggccatgctcatcttcactgacttcctctgcatggcacccatttctttctttgccatttctgcctccctcaaggtgcccctcatcactgtgtccaaagcaaagattctgctggttctgtttcaccccatcaactcctgtgccaaccccttcctctatgccatctttaccaaaaactttcgcagagatttcttcattctgctgagcaagtgtggctgctatgaaatgcaagcccaaatttataggacagaaacttcatccactgtccacaacacccatccaaggaatggccactgctcttcagctcccagagtcaccagtggttccacttacatacttgtccctctaagtcatttagcccaaaactaaaacacaatgtgaaaatgtatctgagtattgaatgataattcagtccttgcctttgaagggtatgtcacaaggagctgacagtgcttctacacatttcatctaatttaatattcctggcatacctttaaggtaaattggtcaggaactattaattccatgtgatacattaggaagctgaattattagtaacaacaataataattaaagaatgcaatactgtaaaaaagcggccgcgaatt

SEQ ID NO: 65 - protein, 695 aa, Homo sapiens [sequence omitted]

SEQ ID NO: 66 - DNA, 1920 bp, Homo sapiens
aattccctcctggagcccccaccctagctgggggccaggtgggttgggggatgtctcaagagccggtcctttggtcaagcagttctgtgagctggcacttttcctgggaaggtccagagctggccttcagggcaccaaaaaagatgccactcctagatgggccccagctaggtggctgagggggccatgtcctgtgatgctcgcagcgggggaagcaacccgttcggggtgccagcgagcacagcgtctgccctaacccgggggcgggcacctcaatgggtacccggtgcctccctacgccttcttcttcccccctatgctgggtggactctccccgccaggcgctctgaccactctccagcaccagcttccagttagtggatatagcacaccatccccagccaccattgagacccagagcagcagttctgaagagatagtgcccagccctccctcgccaccccctctaccccgcatctacaagccttgctttgtctgtcaggacaagtcctcaggctaccactatggggtcagcgcctgtgagggctgcaagggcttcttccgccgcagcatccagaagaacatggtgtacacgtgtcaccgggacaagaactgcatcatcaacaaggtgacccggaaccgctgccagtactgccgactgcagaagtgctttgaagtgggcatgtccaaggagtctgtgagaaacgaccgaaacaagaagaagaaggaggtgcccaagcccgagtgctctgagagctacacgctgacgccggaggtgggggagctcattgagaaggtgcgtaaagcgcaccaggaaaccttccctgccctctgccagctgggcaaatacactacgaacaacagctcagaacaacgtgtctctctggacattgacctctgggacaagttcagtgaactctccaccaagtgcatcattaagactgtggagttcgccaagcagctgcccggcttcaccaccctcaccatcgccgaccagatcaccctcctcaaggctgcctgcctggacatcctgatcctgcggatctgcacgcggtacacgcccgagcaggacaccatgaccttctcggacgggctgaccctgaaccggacccagatgcacaacgctggcttcggccccctcaccgacctggtctttgccttcgccaaccagctgctgcccctggagatggatgatgcggagacggggctgctcagcgccatctgcctcatctgcggagaccgccaggacctggagcagccggaccgggtggacatgctgcaggagccgctgctggaggcgctaaaggtctacgtgcggaagcggaggcccagccgcccccacatgttccccaagatgctaatgaagattactgacctgcgaagcatcagcgccaagggggctgagcgggtgatcacgctgaagatggagatcccgggctccatgccgcctctcatccaggaaatgttggagaactcagagggcctggacactctgagcggacagccggggggtggggggcgggacgggggtggcctggcccccccgccaggcagctgtagccccagcctcagccccagctccaacagaagcagcccggccacccactccccgtgaccgcccacgccacatggacacagccctcgccctccgccccggcttttctctgcctttctaccgaccatgtgaccccgcaccagccctgcccccacctgccctgcccgggagtactggggaccttccctgggggacggggagggaggaggcagcgactccttggacagaggcctgggccctcagtggactgcctgctcccacagcctgggctgacgtcagaggccgaggccaggaactgagtgaggcccctggtcctgggtctcaggatgggtcctgggggcctcgtgttcatcaagacggaattc

SEQ ID NO: 67 - protein, 432 aa, Homo sapiens
MLGGLSPPGALTTLQHQLPVSGYSTPSPATIETQSSSSEEIVPSPPSPPPLPRIYKPCFVCQDKSSGYHYGVSACEGCKGFFRRSIQKNMVYTCHRDKNCIINKVTRNRCQYCRLQKCFEVGMSKESVRNDRNKKKKEVPKPECSESYTLTPEVGELIEKVRKAHQETFPALCQLGKYTTNNSSEQRVSLDIDLWDKFSELSTKCIIKTVEFAKQLPGFTTLTIADQITLLKAACLDILILRICTRYTPEQDTMTFSDGLTLNRTQMHNAGFGPLTDLVFAFANQLLPLEMDDAETGLLSAICLICGDRQDLEQPDRVDMLQEPLLEALKVYVRKRRPSRPHMFPKMLMKITDLRSISAKGAERVITLKMEIPGSMPPLIQEMLENSEGLDTLSGQPGGGGRDGGGLAPPPGSCSPSLSPSSNRSSPATHSP

SEQ ID NO: 68 - DNA, 3576 bp, Mus musculus
ctaaaactagcgacctgtccactattatccagcccccttatgtcctctcaacttgtgagaagtggtgttcaaggacccgcagagagaataggaaaagggatcgggggacctagggatggacttcccatgtcttgctgtccagggcctttctgtgtttcctttcctcttcttggcggtcactctgggactaaaaccagagccagggggccccaggtttcctccacatacacacctggggtagtcaaggagcggttggtaaaagtgggaggccagatggagaaaaaacaggttgtcataaggttgagtgattggagcccaagtaccctacacaggaatgactggtggggggaggaggaggaaaagataggggagggggcggagttttgttacctgtcacctgctctgactgtgcctagggcgggagggggactggtataaagcagcaggcaccagccctgttccacctcacacacggagcgccagccttgagtttgttttctagccccttcccgcctgttcaccaccaccatgaccccgggcattcgggctcctttcttcctgctgctacttctagcaagtctaaaaggtgagaggcgcaaggtggggaggggctgcgctgttcaggtgggactcccagtctttctgtggagtttgcttactggtagattatgagagtcataaatggccatccatacaggtatggcccagtatgtgccaggggggaaaagaggctaaggaaggaggctgagaagaggtgacccctcaggagagtgggcactatagtaggcaaataatactctttgtggggagtagagaagagaggctgtgtcaggagaatgagctccggagtggaagaatggggccgtgtgcagtggttccagtctatagttcccacaccctggacgctcaggttcacagagagttcaaggccagcttaggctacagtatgaatacttgtctcaagtagaggaataaatgagccagaagcagaggtgagacctctgcttagggagggaggctgtcaggatgaaggcaaaccaggggctacctgatgctaacatgatcccccttccttccccggttactttgttttcagagtttatatttttcttcttgctctgatttttattcatcaacccagtaggtttttttttttttgttgttgttgttttgttttttttttcttcaactttggctctagccggaactaaaacatcacacatgttatccaaagcgacccagtgtccaactctgttgattagtgctgcgctgctgtgagcataaaaacagtttacccctaatcttccactctggttcaggttttcttgcccttccaagtgaggaaaacagtgtcacctcatctcaggacaccagcagttccttagcatcgactaccactccagtccacagcagcaactcagacccagccaccagacctccaggggactccaccagctctccagtccagagtagcacctcttctccagccaccagagctcctgaagactctaccagtactgcagtcctcagtggcacctcctccccagccaccacagctccagtgaactccgccagctctccagtagcccatggtgacacctcttccccagccactagccctttaaaagactccaacagctctccagtagtccacagtggcacctcttcagctgccaccacagctccagtggattccaccagctctccagtagtccacggtggtacctcgtccccagccaccagccctccaggggactccaccagctctccagaccatagtagcacctcttctccagccaccagagctcccgaagactctaccagtactgcagtcctcagtggcacctcctccccagccaccacagctccagtggactccaccagctctccagtagcccatgatgacacctcttccccagccactagcctttcagaagactccgccagctctccagtagcccacggtggcacctcttctccagccaccagccctctaagggactccaccagttctccagttcacagtagtgcctccatccaaaacatcaagactacatcagacttagctagcactccagaccacaatggcacctcagtcacaactaccagctctgcactgggctcagccaccagtccagaccacagtggtacctcaactacaactaacagctctgaatcagtcttggccaccactccagtttacagtagcatgccattctctactaccaaagtgacgtcaggctcagctatcattccagaccacaatggctcctcggtgctacctaccagttctgtgttgggctcagctaccagtctagtctataatacctctgcaatagctacaactccagtcagcaatggcactcagccttcagtgccaagtcaataccctgtttctcctaccatggccaccacctccagccacagcactattgccagcagctcttactatagcacagtaccattttctaccttctccagtaacagttcaccccagttgtctgttggggtctccttcttcttcttgttcttttacattcaaaaccacccatttaattcttctctggaagaccccagctccaactactaccaagaactgaagaggaacatttctggattggtgggtatcagcctagcctctgccatgtgtcccctgacgtagctcttcaggactgcatggctttcacatcactcctgagtcttctcctcttctcccagtttctgcagatttttaacggagattttctggggatctctagcatcaagttcaggtacgttctggatttgacttgggggaggaatggtcagtctcgtgactttgtggtgtcgggatgggggtggggtggggagaggagtgctgagctataagctcagtctatctgagctccctatttcctgtgaccaggtcaggctccgtggtggtagaatcgactgtggttttccgggagggtacttttagtgcctctgacgtgaagtcacagcttatacagcataagaaggaggcagatagctataatctgactatttcagaagtcaaaggtgaggtgatagccccagctgcagcctggcaccatactatggggctttaccacctgtttacttctggcgccaggagtgggaaatccacctcccttggggacttccctgaccaccgctttcccttctagtgaatgagatgcagttccctccctctgcccagtcccggccgggggtaccaggctggggcattgccctgctggtgctggtctgtattttggttgctttggctatcgtctatttccttgccctggtaagtctcaagccttctgcggcgcggtgtgcccttggtaaatggaaggggactggccaatccaatctcctgtctccctaggcagtgtgccagtgccgccgaaagagctatgggcagctggacatctttccaacccaggacacctaccatcctatgagtgaataccctacctaccacactcacggacgctacgtgccccctggcagtaccaagcgtcagccctatgaggaggtaaagtgtatcccgaagaagcttgggccatcgacctgggcagggtggggccttct

SEQ ID NO: 69 - protein, 630 aa, Mus musculus
MTPGIRAPFFLLLLLASLKGFLALPSEENSVTSSQDTSSSLASTTTPVHSSNSDPATRPPGDSTSSPVQSSTSSPATRAPEDSTSTAVLSGTSSPATTAPVNSASSPVAHGDTSSPATSPLKDSNSSPVVHSGTSSAATTAPVDSTSSPVVHGGTSSPATSPPGDSTSSPDHSSTSSPATRAPEDSTSTAVLSGTSSPATTAPVDSTSSPVAHDDTSSPATSLSEDSASSPVAHGGTSSPATSPLRDSTSSPVHSSASIQNIKTTSDLASTPDHNGTSVTTTSSALGSATSPDHSGTSTTTNSSESVLATTPVYSSMPFSTTKVTSGSAIIPDHNGSSVLPTSSVLGSATSLVYNTSAIATTPVSNGTQPSVPSQYPVSPTMATTSSHSTIASSSYYSTVPFSTFSSNSSPQLSVGVSFFFLFFYIQNHPFNSSLEDPSSNYYQELKRNISGLFLQIFNGDFLGISSIKFRSGSVVVESTVVFREGTFSASDVKSQLIQHKKEADSYNLTISEVKVNEMQFPPSAQSRPGVPGWGIALLVLVCILVALAIVYFLALAVCQCRRKSYGQLDIFPTQDTYHPMSEYPTYHTHGRYVPPGSTKRQPYEEVSAGNGSSSLSYTNPAVVTTSANL

SEQ ID NO: 70 - DNA, 755 bp, Homo sapiens
ctcgtgggccctgaccttctctctgagagccgggcagaggctccggagccatgcaggccgaaggccggggcacagggggttcgacgggcgatgctgatggcccaggaggccctggcattcctgatggcccagggggcaatgctggcggcccaggagaggcgggtgccacgggcggcagaggtccccggggcgcaggggcagcaagggcctcggggccgggaggaggcgccccgcggggtccgcatggcggcgcggcttcagggctgaatggatgctgcagatgcggggccagggggccggagagccgcctgcttgagttctacctcgccatgcctttcgcgacacccatggaagcagagctggcccgcaggagcctggcccaggatgccccaccgcttcccgtgccaggggtgcttctgaaggagttcactgtgtccggcaacatactgactatccgactgactgctgcagaccaccgccaactgcagctctccatcagctcctgtctccagcagctttccctgttgatgtggatcacgcagtgctttctgcccgtgtttttggctcagcctccctcagggcagaggcgctaagcccagcctggcgccccttcctaggtcatgcctcctcccctagggaatggtcccagcacgagtggccagttcattgtgggggcctgattgtttgtcgctggaggaggacggcttacatgtttgtttctgtagaaaataaaactgagctacgaaaaaaaaaaa

SEQ ID NO: 71 - protein, 180 aa, Homo sapiens
MQAEGRGTGGSTGDADGPGGPGIPDGPGGNAGGPGEAGATGGRGPRGAGAARASGPGGGAPRGPHGGAASGLNGCCRCGARGPESRLLEFYLAMPFATPMEAELARRSLAQDAPPLPVPGVLLKEFTVSGNILTIRLTAADHRQLQLSISSCLQQLSLLMWITQCFLPVFLAQPPSGQRR

SEQ ID NO: 72 - DNA, 1524 bp, Homo sapiens
agcagacagaggactctcattaaggaaggtgtcctgtgccctgaccctacaagatgccaagagaagatgctcacttcatctatggttaccccaagaaggggcacggccactcttacaccacggctgaagaggccgctgggatcggcatcctgacagtgatcctgggagtcttactgctcatcggctgttggtattgtagaagacgaaatggatacagagccttgatggataaaagtcttcatgttggcactcaatgtgccttaacaagaagatgcccacaagaagggtttgatcatcgggacagcaaagtgtctcttcaagagaaaaactgtgaacctgtggttcccaatgctccacctgcttatgagaaactctctgcagaacagtcaccaccaccttattcaccttaagagccagcgagacacctgagacatgctgaaattatttctctcacacttttgcttgaatttaatacagacatctaatgttctcctttggaatggtgtaggaaaaatgcaagccatctctaataataagtcagtgttaaaattttagtaggtccgctagcagtactaatcatgtgaggaaatgatgagaaatattaaattgggaaaactccatcaataaatgttgcaatgcatgatactatctgtgccagaggtaatgttagtaaatccatggtgttattttctgagagacagaattcaagtgggtattctggggccatccaatttctctttacttgaaatttggctaataacaaactagtcaggttttcgaaccttgaccgacatgaactgtacacagaattgttccagtactatggagtgctcacaaaggatacttttacaggttaagacaaagggttgactggcctatttatctgatcaagaacatgtcagcaatgtctctttgtgctctaaaattctattatactacaataatatattgtaaagatcctatagctctttttttttgagatggagtttcgcttttgttgcccaggctggagtgcaatggcgcgatcttggctcaccataacctccgcctcccaggttcaagcaattctcctgccttagcctcctgagtagctgggattacaggcgtgcgccactatgcctgactaattttgtagttttagtagagacggggtttctccatgttggtcaggctggtctcaaactcctgacctcaggtgatctgcccgcctcagcctcccaaagtgctggaattacaggcgtgagccaccacgcctggctggatcctatatcttaggtaagacatataacgcagtctaattacatttcacttcaaggctcaatgctattctaactaatgacaagtattttctactaaaccagaaattggtagaaggatttaaataagtaaaagctactatgtactgccttagtgctgatgcctgtgtactgccttaaatgtacctatggcaatttagctctcttgggttcccaaatccctctcacaagaatgtgcagaagaaatcataaaggatcagagattctg

SEQ ID NO: 73 - protein, 118 aa, Homo sapiens
MPREDAHFIYGYPKKGHGHSYTTAEEAAGIGILTVILGVLLLIGCWYCRRRNGYRALMDKSLHVGTQCALTRRCPQEGFDHRDSKVSLQEKNCEPVVPNAPPAYEKLSAEQSPPPYSP

SEQ ID NO: 74 - DNA, 1602 bp, Mus musculus
atgttcttggctgttttgtattgccttctgtggagtttccagatctctgatggccattttcctcgagcctgtgcctcctctaagaacttgttggcaaaagaatgctgcccaccatggatcggtgatgggagtccctgcggccagctttcaggcagaggttcctgccaggatatccttctgtccagtgcaccatctggacctcagttccccttcaaaggggtggatgaccgtgagtcctggccctctgtgttttataataggacctgccagtgctcaggcaacttcatgggtttcaactgcggaaactgtaagtttggatttgggggcccaaattgtacagagaagcgagtcttgattagaagaaacatttttgatttgagtgtctccgaaaagaataagttcttttcttacctcactttagcaaaacatactatcagctcagtctatgtcatccccacaggcacctatggccaaatgaacaatgggtcaacacccatgtttaatgatatcaacatctacgacctctttgtatggatgcattactatgtgtcaagggacacactgcttgggggctctgaaatatggaggcagattgattttgcccatgaagcaccagggtttctgccttggcacagacttttcttgttattgtgggaacaagaaattcgagaactaactggggatgagaacttcactgttccatactgggattggagagatgcagaaaactgtgacatttgcacagatgagtacttgggaggtcgtcaccctgaaaatcctaacttactcagcccagcatccttcttctcctcctggcagatcatttgtagcagatcagaagagtataatagccatcaggttttatgcgatggaacacctgagggaccactattacgtaatcctggaaaccatgacaaagccaaaacccccaggctcccatcttcagcagatgtggaattttgtctgagtttgacccagtatgaatctggatcaatggatagaactgccaatttcagctttagaaacacactggaaggatttgccagtccactcacagggatagcagatccttctcaaagtagcatgcacaatgccttacatatctttatgaatggaacaatgtcccaagtacagggatcggccaacgatcccatttttcttcttcaccatgcttttgtggacagtatttttgaacaatggctgcgaaggcaccgccctcttttggaagtttacccagaagccaatgcacctatcggccgtaacagagactcttacatggttcctttcataccgctctatagaaatggtgatttcttcataacatccaaggatctgggatatgactacagctacctccaagagtcagatccaggcttttacagaaattatattgagccttacttggaacaagccagtcgtatctggccatggcttcttggggcagcactggtgggagctgttattgctgcagctctctctgggcttagcagtaggctatgccttcagaagaagaagaagaagaagcaaccccaggaggaaaggcagccactcctcatggacaaagacgactaccacagcttgctgtatcagagccatctgtga

SEQ ID NO: 75 - protein, 533 aa, Mus musculus
MFLAVLYCLLWSFQISDGHFPRACASSKNLLAKECCPPWIGDGSPCGQLSGRGSCQDILLSSAPSGPQFPFKGVDDRESWPSVFYNRTCQCSGNFMGFNCGNCKFGFGGPNCTEKRVLIRRNIFDLSVSEKNKFFSYLTLAKHTISSVYVIPTGTYGQMNNGSTPMFNDINIYDLFVWMHYYVSRDTLLGGSEIWRQIDFAHEAPGFLPWHRLFLLLWEQEIRELTGDENFTVPYWDWRDAENCDICTDEYLGGRHPENPNLLSPASFFSSWQIICSRSEEYNSHQVLCDGTPEGPLLRNPGNHDKAKTPRLPSSADVEFCLSLTQYESGSMDRTANFSFRNTLEGFASPLTGIADPSQSSMHNALHIFMNGTMSQVQGSANDPIFLLHHAFVDSIFEQWLRRHRPLLEVYPEANAPIGRNRDSYMVPFIPLYRNGDFFITSKDLGYDYSYLQESDPGFYRNYIEPYLEQASRIWPWLLGAALVGAVIAAALSGLSSRLCLQKKKKKKQPQEERQPLLMDKDDYHSLLYQSHL

SEQ ID NO: 76 - DNA, 2130 bp, Homo sapiens
cgcggaatccggaagaacacaatggatctggtgctaaaaagatgccttcttcatttggctgtgataggtgctttgctggctgtgggggctacaaaagtacccagaaaccaggactggcttggtgtctcaaggcaactcagaaccaaagcctggaacaggcagctgtatccagagtggacagaagcccagagacttgactgctggagaggtggtcaagtgtccctcaaggtcagtaatgatgggcctacactgattggtgcaaatgcctccttctctattgccttgaacttccctggaagccaaaaggtattgccagatgggcaggttatctgggtcaacaataccatcatcaatgggagccaggtgtggggaggacagccagtgtatccccaggaaactgacgatgcctgcatcttccctgatggtggaccttgcccatctggctcttggtctcagaagagaagctttgtttatgtctggaagacctggggccaatactggcaagttctagggggcccagtgtctgggctgagcattgggacaggcagggcaatgctgggcacacacaccatggaagtgactgtctaccatcgccggggatcccggagctatgtgcctcttgctcattccagctcagccttcaccattactgaccaggtgcctttctccgtgagcgtgtcccagttgcgggccttggatggagggaacaagcacttcctgagaaatcagcctctgacctttgccctccagctccatgaccccagtggctatctggctgaagctgacctctcctacacctgggactttggagacagtagtggaaccctgatctctcgggcacttgtggtcactcatacttacctggagcctggcccagtcactgcccaggtggtcctgcaggctgccattcctctcacctcctgtggctcctccccagttccaggcaccacagatgggcacaggccaactgcagaggcccctaacaccacagctggccaagtgcctactacagaagttgtgggtactacacctggtcaggcgccaactgcagagccctctggaaccacatctgtgcaggtgccaaccactgaagtcataagcactgcacctgtgcagatgccaactgcagagagcacaggtatgacacctgagaaggtgccagtttcagaggtcatgggtaccacactggcagagatgtcaactccagaggctacaggtatgacacctgcagaggtatcaattgtggtgctttctggaaccacagctgcacaggtaacaactacagagtgggtggagaccacagctagagagctacctatccctgagcctgaaggtccagatgccagctcaatcatgtctacggaaagtattacaggttccctgggccccctgctggatggtacagccaccttaaggctggtgaagagacaagtccccctggattgtgttctgtatcgatatggttccttttccgtcaccctggacattgtccagggtattgaaagtgccgagatcctgcaggctgtgccgtccggtgagggggatgcatttgagctgactgtgtcctgccaaggcgggctgcccaaggaagcctgcatggagatctcatcgccagggtgccagccccctgcccagcggctgtgccagcctgtgctacccagcccagcctgccagctggttctgcaccagatactgaagggtggctcggggacatactgcctcaatgtgtctctggctgataccaacagcctggcagtggtcagcacccagcttatcatgcctggtcaagaagcaggccttgggcaggttccgctgatcgtgggcatcttgctggtgttgatggctgtggtccttgcatctctgatatataggcgcagacttatgaagcaagacttctccgtaccccagttgccacatagcagcagtcactggctgcgtctaccccgcatcttctgctcttgtcccattggtgagaatagccccctcctcagtgggcagcaggtctgagtactctcatatgatgctgtgattttcctggagttgacagaaacacctatatttcccccagtcttccctgggagactactattaactgaaataaatactcagagcctgaaaaaaaaaaaaaaa

SEQ ID NO: 77 - protein, 661 aa, Homo sapiens
MDLVLKRCLLHLAVIGALLAVGATKVPRNQDWLGVSRQLRTKAWNRQLYPEWTEAQRLDCWRGGQVSLKVSNDGPTLIGANASFSIALNFPGSQKVLPDGQVIWVNNTIINGSQVWGGQPVYPQETDDACIFPDGGPCPSGSWSQKRSFVYVWKTWGQYWQVLGGPVSGLSIGTGRAMLGTHTMEVTVYHRRGSRSYVPLAHSSSAFTITDQVPFSVSVSQLRALDGGNKHFLRNQPLTFALQLHDPSGYLAEADLSYTWDFGDSSGTLISRALVVTHTYLEPGPVTAQVVLQAAIPLTSCGSSPVPGTTDGHRPTAEAPNTTAGQVPTTEVVGTTPGQAPTAEPSGTTSVQVPTTEVISTAPVQMPTAESTGMTPEKVPVSEVMGTTLAEMSTPEATGMTPAEVSIVVLSGTTAAQVTTTEWVETTARELPIPEPEGPDASSIMSTESITGSLGPLLDGTATLRLVKRQVPLDCVLYRYGSFSVTLDIVQGIESAEILQAVPSGEGDAFELTVSCQGGLPKEACMEISSPGCQPPAQRLCQPVLPSPACQLVLHQILKGGSGTYCLNVSLADTNSLAVVSTQLIMPGQEAGLGQVPLIVGILLVLMAVVLASLIYRRRLMKQDFSVPQLPHSSSHWLRLPRIFCSCPIGENSPLLSGQQV

SEQ ID NO: 78 - DNA, 6471 bp, Homo sapiens
ccaaaaacctgcccgttttcactgctaggaggccttgggagggcattagggagagacgctagcgtgctccagtcctcttgggggttcatggaatgggaacttgatctgaaaaacagtcctggagagaagagggagggagtggaggccgtatcaggaataataggttgaggaagactgagggtcctccatgccatttcagacggagggcagtggagccctacctggagtctgggaggccataccccactgtggatggatgtgattctacctctcttgcaccttgcaggtctcaaggatgggaggggcttattcggaggtgaaagactcagatgcatagaggcagggagccagacaatgtcaggagtccaggaacagcctctcaggaaggcaggaagggaacaccatgactggtagtgctgcctgtcctgtccctgtgcctgctgccagccatggaggagcccatcaggtccccagatttacaaatttctgacttccattttgggagtcagccagagggagatttctctgaggagggcagcttcagttaaacagagggagtagcccagggctgggcactcaacaagaagagaactctgtcgaaggacagtgacctccgaacacggggggagggcacaggctgcaccctgccactccctgctgtcagccctggaaaaggtgggtgtgagtgtcaagactggggaggtgggagggaagaggtcagcagggcttagggagtgagcagaaaggtttggagcacatcctggaggtgggaaggaagggatggaaaggaggctgacaagcgggcggcgggcggggggccgccttcctcctctgagaggaggccccgccccacgctatccgggctgtcagccctgatcaaccctgacagagttcccggatgtgctttgccggatgtgctttcccggcggccatcttgggagtctgaaggacctgaggcattttgtgacgaggatcgtctcaggtcagcggagggaggagacttatagacctatccagtcttcaaggtgagggccccgagggagaagttgagggacaaccccaccacagagagaagcagccctggcctgccctatccctgcggtggcacttgtaggtggcggaaacgaagatggtagccgagggctgagggacgtgtcctcacggcagaagaagggaggaaatgccggccctctagagaataaataggaaggcattgaggaggaccgggggaacccccacctcagaggacagattcccagagattcccacctgctcctcaaatcagcccccatagagctctccaggtggctgaggctgagcggccaccctctcactgctgggtgagggggtgtgggggagggggaggaggaggccttgttctgggggtcccatggcaagtcagcatggggagctgcctccagttggcagagggaagattcccaggccctgctgggaacaagagtgaggactgaggggtcacatgtgcgtcagaacagacgtgaggccacagggaccgcgtcccgtggtagagtgctgggaggtgctgccacctcactacctcccactgctctcagtgatgtggagttttcctgaggtttttcctcaggccagcagagtggtggggcctggccctgtctgagaaaatgtgacaatgctaattgaattctgagggggtcacgaacctcagaattgtgggactctgggagtctggccagccccagctgccgtcttagctggaggggctccctcccttcctcttgcaggtgctccagaaagcaggagttgaagacctgggtgtgagggacacatacatcctaaaagcaccacagcagaggaggcccaggcagtgccaggagtcaaggtgagtgcacgacctgactgtgtaccaagggccgtacccccagaaacagtgtcagacctggcagcaccggccctgtagccacccactgtcattcctggtgcctcatggctctgcctgccagctgtgccccgaggtgctttctcgcgtccttctacaggttcccagaagacaaaccccctaggaagacaggcgacctgtgaggccctagagcaccaccttaagagaagaagagctgtaagccggcctttgtcagagccatcatgggtgagtttctcagctgaggccactggcactgtccctctctccctcagtcctgtgggatcccatcatacctattcgtgttcacacgtttacctgctgctcctgaacaatattcatcatgcctctctttctaaaccttccacgccccagctttgagcaaggcttccagaaggcaattttcatactggagttggtagatgcagaggatcccccagatgaggaagaggaggaagcttcctccattttctcttcctctttccactttttattcccctcgtcctcctcctgtttttctttctcatcctcatcctcctctctgcttctgcgttctccaggggacaaggatatgcctactgctgggatgccgagtcttctccagagttcctctgagagtcctcagagttatcctgagggggaggactcccagtctcctctccagattccccagagttctcctgagagcgacgacaccctgtatcctctccagagtcctcagagtcgttctgagggggaggactcctcggatcctctccagagacctcctgaggggaaggactcccagtctcctctccagattccccagagttctcctgagggcgacgacacccagtctcctctccagaattctcagagttctcctgaggggaaggactccctgtctcctctagagatttctcagagccctcctgagggtgaggatgtccagtctcctctgcagaatcctgcgagttccttcttctcctctgctttattgagtattttccagagttcccctgagagtattcaaagtccttttgagggttttccccagtctgttctccagattcctgtgagcgccgcctcctcctccactttagtgagtattttccagagttcccctgagagtactcaaagtccttttgagggttttccccagtctccactccagattcctgtgagccgctccttctcctccactttattgagtattttccagagttcccctgagagaagtcagagaacttctgagggttttgcacagtctcctctccagattcctgtgagctcctcctcgtcctccactttactgagtcttttccagagttcccctgagagaactcagagtacttttgagggttttccccagtctccactccagattcctgtgagccgctccttctcctccactttattgagtattttccagagttcccctgagagaactcagagtacttttgagggttttgcccagtctcctctccagattcctgtgagctcctcctcctcctccactttattgagtcttttccagagttcccctgagagaactcagagtacttttgagggttttccccagtctcttctccagattcctatgacctcctccttctcctctactttattgagtattttccagagttctcctgagagtgctcaaagtacttttgagggttttccccagtctcctctccagattcctgggagcccctccttctcctccactttactgagtcttttccagagttcccctgagagaactcacagtacttttgagggttttccccagtctcctctccagattcctatgacctcctccttctcctctactttattgagtattttacagagttctcctgagagtgctcaaagtgcttttgagggttttccccagtctcctctccagattcctgtgagctcctctttctcctacactttattgagtcttttccagagttcccctgagagaactcagagtacttttgagggttttccccagtctcctctccagattcctgtgagctcctcctcctcctcctccactttattgagtcttttccagagttcccctgagtgtactcaaagtacttttgagggttttccccagtctcctctccagattcctcagagtcctcctgaaggggagaatacccattctcctctccagattgttccaagtcttcctgagtgggaggactccctgtctcctcactactttcctcagagccctcctcagggggaggactccctatctcctcactactttcctcagagccctcctcagggggaggactccctgtctcctcactactttcctcagagccctcagggggaggactccctgtctcctcactactttcctcagagccctcctcagggggaggactccatgtctcctctctactttcctcagagtcctcttcagggggaggaattccagtcttctctccagagccctgtgagcatctgctcctcctccactccatccagtcttccccagagtttccctgagagttctcagagtcctcctgaggggcctgtccagtctcctctccatagtcctcagagccctcctgaggggatgcactcccaatctcctctccagagtcctgagagtgctcctgagggggaggattccctgtctcctctccaaattcctcagagtcctcttgagggagaggactccctgtcttctctccattttcctcagagtcctcctgagtgggaggactccctctctcctctccactttcctcagtttcctcctcagggggaggacttccagtcttctctccagagtcctgtgagtatctgctcctcctccacttctttgagtcttccccagagtttccctgagagtcctcagagtcctcctgaggggcctgctcagtctcctctccagagacctgtcagctccttcttctcctacactttagcgagtcttctccaaagttcccatgagagtcctcagagtcctcctgaggggcctgcccagtctcctctccagagtcctgtgagctccttcccctcctccacttcatcgagtctttcccagagttctcctgtgagctccttcccctcctccacttcatcgagtctttccaagagttcccctgagagtcctctccagagtcctgtgatctccttctcctcctccacttcattgagcccattcagtgaagagtccagcagcccagtagatgaatatacaagttcctcagacaccttgctagagagtgattccttgacagacagcgagtccttgatagagagcgagcccttgttcacttatacactggatgaaaaggtggacgagttggcgcggtttcttctcctcaaatatcaagtgaagcagcctatcacaaaggcagagatgctgacgaatgtcatcagcaggtacacgggctactttcctgtgatcttcaggaaagcccgtgagttcatagagatactttttggcatttccctgagagaagtggaccctgatgactcctatgtctttgtaaacacattagacctcacctctgaggggtgtctgagtgatgagcagggcatgtcccagaaccgcctcctgattcttattctgagtatcatcttcataaagggcacctatgcctctgaggaggtcatctgggatgtgctgagtggaataggggtgcgtgctgggagggagcactttgcctttggggagcccagggagctcctcactaaagtttgggtgcaggaacattacctagagtaccgggaggtgcccaactcttctcctcctcgttacgaattcctgtggggtccaagagctcattcagaagtcattaagaggaaagtagtagagtttttggccatgctaaagaataccgtccctattacctttccatcctcttacaaggatgctttgaaagatgtggaagagagagcccaggccataattgacaccacagatgattcgactgccacagaaagtgcaagctccagtgtcatgtcccccagcttctcttctgagtgaagtctagggcagattcttccctctgagtttgaagggggcagtcgagtttctacgtggtggagggcctggttgaggctggagagaacacagtgctatttgcatttctgttccatatgggtagttatggggtttacctgttttacttttgggtatttttcaaatgcttttcctattaataacaggtttaaatagcttcagaatcctagtttatgcacatgagtcgcacatgtattgctgtttttctggtttaagagtaacagtttgatattttgtaaaaacaaaaacacacccaaacacaccacattgggaaaaccttctgcctcattttgtgatgtgtcacaggttaatgtggtgttactgtaggaattttcttgaaactgtgaaggaactctgcagttaaatagtggaataaagtaaaggattgttaatgtttgcatttcctcaggtcctttagtctgttgttcttgaaaactaaagatacatacctggtttgcttggcttacgtaagaaagtagaagaaagtaaactgtaataaataaagtgtcagtgactcattatttgatgacattgtatcagcatttgcccatag

SEQ ID NO: 79 - protein, 1142 aa, Homo sapiens
MGDKDMPTAGMPSLLQSSSESPQSYPEGEDSQSPLQIPQSSPESDDTLYPLQSPQSRSEGEDSSDPLQRPPEGKDSQSPLQIPQSSPEGDDTQSPLQNSQSSPEGKDSLSPLEISQSPPEGEDVQSPLQNPASSFFSSALLSIFQSSPESIQSPFEGFPQSVLQIPVSAASSSTLVSIFQSSPESTQSPFEGFPQSPLQIPVSRSFSSTLLSIFQSSPERSQRTSEGFAQSPLQIPVSSSSSSTLLSLFQSSPERTQSTFEGFPQSPLQIPVSRSFSSTLLSIFQSSPERTQSTFEGFAQSPLQIPVSSSSSSTLLSLFQSSPERTQSTFEGFPQSLLQIPMTSSFSSTLLSIFQSSPESAQSTFEGFPQSPLQIPGSPSFSSTLLSLFQSSPERTHSTFEGFPQSPLQIPMTSSFSSTLLSILQSSPESAQSAFEGFPQSPLQIPVSSSFSYTLLSLFQSSPERTQSTFEGFPQSPLQIPVSSSSSSSTLLSLFQSSPECTQSTFEGFPQSPLQIPQSPPEGENTHSPLQIVPSLPEWEDSLSPHYFPQSPPQGEDSLSPHYFPQSPPQGEDSLSPHYFPQSPQGEDSLSPHYFPQSPPQGEDSMSPLYFPQSPLQGEEFQSSLQSPVSICSSSTPSSLPQSFPESSQSPPEGPVQSPLHSPQSPPEGMHSQSPLQSPESAPEGEDSLSPLQIPQSPLEGEDSLSSLHFPQSPPEWEDSLSPLHFPQFPPQGEDFQSSLQSPVSICSSSTSLSLPQSFPESPQSPPEGPAQSPLQRPVSSFFSYTLASLLQSSHESPQSPPEGPAQSPLQSPVSSFPSSTSSSLSQSSPVSSFPSSTSSSLSKSSPESPLQSPVISFSSSTSLSPFSEESSSPVDEYTSSSDTLLESDSLTDSESLIESEPLFTYTLDEKVDELARFLLLKYQVKQPITKAEMLTNVISRYTGYFPVIFRKAREFIEILFGISLREVDPDDSYVFVNTLDLTSEGCLSDEQGMSQNRLLILILSIIFIKGTYASEEVIWDVLSGIGVRAGREHFAFGEPRELLTKVWVQEHYLEYREVPNSSPPRYEFLWGPRAHSEVIKRKVVEFLAMLKNTVPITFPSSYKDALKDVEERAQAIIDTTDDSTATESASSSVMSPSFSSE

SEQ ID NO: 80 - DNA, 1004 bp, Homo sapiens
cgccaatttagggtctccggtatctcccgctgagctgctctgttcccggcttagaggaccaggagaagggggagctggaggctggagcctgtaacaccgtggctcgtctcactctggatggtggtggcaacagagatggcagcgcagctggagtgttaggagggcggcctgagcggtaggagtggggctggagcagtaagatggcggccagagcggtttttctggcattgtctgcccagctgctccaagccaggctgatgaaggaggagtcccctgtggtgagctggaggttggagcctgaagacggcacagctctgtgcttcatcttctgaggttgtggcagccacggtgatggagacggcagctcaacaggagcaataggaggagatggagtttcactgtgtcagccaggatggtctcgatctcctgacctcgtgatccgcccgccttggccttccaaagtgccgagattacagcgatgtgcattttgtaagcactttggagccactatcaaatgctgtgaagagaaatgtacccagatgtatcattatccttgtgctgcaggagccggctcctttcaggatttcagtcacatcttcctgctttgtccagaacacattgaccaagctcctgaaagatgtaagtttactacgcatagacttttaaacttcaaccaatgtatttactgaaaataacaaatgttgtaaattccctgagtgttattctacttgtattaaaaggtaataatacataatcattaaaatctgagggatcattgccagagattgttggggagggaaatgttatcaacggtttcattgaaattaaatccaaaaagttatttcctcagaaaaatcaaataaagtttgcatgttttttattcttaaaacattttaaaaaccactgtagaatgatgtaaatagggactgtgcagtatttctgacatatactataaaattattaaaaagtcaatcagtattcaacatcttttacactaaaaagcc

SEQ ID NO: 81 - protein, 43 aa, Homo sapiens
MAARAVFLALSAQLLQARLMKEESPVVSWRLEPEDGTALCFIF

SEQ ID NO: 82 - DNA, 646 bp, Homo sapiens
ctgccgtccggactctttttcctctactgagattcatctgtgtgaaatatgagttggcgaggaagatcgacctatcggcctagaccaagacgctacgtagagcctcctgaaatgattgggcctatgcggcccgagcagttcagtgatgaagtggaaccagcaacacctgaagaaggggaaccagcaactcaacgtcaggatcctgcagctgctcaggagggagaggatgagggagcatctgcaggtcaagggccgaagcctgaagctgatagccaggaacagggtcacccacagactgggtgtgagtgtgaagatggtcctgatgggcaggagatggacccgccaaatccagaggaggtgaaaacgcctgaagaagagatgaggtctcactatgttgcccagactgggattctctggcttttaatgaacaattgcttcttaaatctttccccacggaaaccttgagtgactgaaatatcaaatggcgagagaccgtttagttcctatcatctgtggcatgtgaagggcaatcacagtgttaaaagaagacatgctgaaatgttgcaggctgctcctatgttggaaaattcttcattgaagttctcccaataaagctttacagccttctgcaaagaaaaaaaaaaaa

SEQ ID NO: 83 - protein, 138 aa, Homo sapiens
MSWRGRSTYRPRPRRYVEPPEMIGPMRPEQFSDEVEPATPEEGEPATQRQDPAAAQEGEDEGASAGQGPKPEADSQEQGHPQTGCECEDGPDGQEMDPPNPEEVKTPEEEMRSHYVAQTGILWLLMNNCFLNLSPRKP

SEQ ID NO: 84 - DNA, 766 bp, Homo sapiens
ctctctttcgattcttccatactcagagtacgcacggtctgattttctctttggattcttccaaaatcagagtcagactgctcccggtgccatgaacggagacgacgcctttgcaaggagacccacggttggtgctcaaataccagagaagatccaaaaggccttcgatgatattgccaaatacttctctaaggaagagtgggaaaagatgaaagcctcggagaaaatcttctatgtgtatatgaagagaaagtatgaggctatgactaaactaggtttcaaggccaccctcccacctttcatgtgtaataaacgggccgaagacttccaggggaatgatttggataatgaccctaaccgtgggaatcaggttgaacgtcctcagatgactttcggcaggctccagggaatctccccgaagatcatgcccaagaagccagcagaggaaggaaatgattcggaggaagtgccagaagcatctggcccacaaaatgatgggaaagagctgtgccccccgggaaaaccaactacctctgagaagattcacgagagatctggacccaaaaggggggaacatgcctggacccacagactgcgtgagagaaaacagctggtgatttatgaagagatcagcgaccctgaggaagatgacgagtaactcccctcagggatacgacacatgcccatgatgagaagcagaacgtggtgacctttcacgaacatgggcatggctgcggacccctcgtcatcaggtgcatagcaagtg

SEQ ID NO: 85 - protein, 188 aa, Homo sapiens
MNGDDAFARRPTVGAQIPEKIQKAFDDIAKYFSKEEWEKMKASEKIFYVYMKRKYEAMTKLGFKATLPPFMCNKRAEDFQGNDLDNDPNRGNQVERPQMTFGRLQGISPKIMPKKPAEEGNDSEEVPEASGPQNDGKELCPPGKPTTSEKIHERSGPKRGEHAWTHRLRERKQLVIYEEISDPEEDDE

SEQ ID NO: 86 - DNA, 2974 bp, Homo sapiens
ctcagggcagagggaggaaggacagcagaccagacagtcacagcagccttgacaaaacgttcctggaactcaagctcttctccacagaggaggacagagcagacagcagagaccatggagtctccctcggcccctccccacagatggtgcatcccctggcagaggctcctgctcacagcctcacttctaaccttctggaacccgcccaccactgccaagctcactattgaatccacgccgttcaatgtcgcagaggggaaggaggtgcttctacttgtccacaatctgccccagcatctttttggctacagctggtacaaaggtgaaagagtggatggcaaccgtcaaattataggatatgtaataggaactcaacaagctaccccagggcccgcatacagtggtcgagagataatataccccaatgcatccctgctgatccagaacatcatccagaatgacacaggattctacaccctacacgtcataaagtcagatcttgtgaatgaagaagcaactggccagttccgggtatacccggagctgcccaagccctccatctccagcaacaactccaaacccgtggaggacaaggatgctgtggccttcacctgtgaacctgagactcaggacgcaacctacctgtggtgggtaaacaatcagagcctcccggtcagtcccaggctgcagctgtccaatggcaacaggaccctcactctattcaatgtcacaagaaatgacacagcaagctacaaatgtgaaacccagaacccagtgagtgccaggcgcagtgattcagtcatcctgaatgtcctctatggcccggatgcccccaccatttcccctctaaacacatcttacagatcaggggaaaatctgaacctctcctgccacgcagcctctaacccacctgcacagtactcttggtttgtcaatgggactttccagcaatccacccaagagctctttatccccaacatcactgtgaataatagtggatcctatacgtgccaagcccataactcagacactggcctcaataggaccacagtcacgacgatcacagtctatgcagagccacccaaacccttcatcaccagcaacaactccaaccccgtggaggatgaggatgctgtagccttaacctgtgaacctgagattcagaacacaacctacctgtggtgggtaaataatcagagcctcccggtcagtcccaggctgcagctgtccaatgacaacaggaccctcactctactcagtgtcacaaggaatgatgtaggaccctatgagtgtggaatccagaacgaattaagtgttgaccacagcgacccagtcatcctgaatgtcctctatggcccagacgaccccaccatttccccctcatacacctattaccgtccaggggtgaacctcagcctctcctgccatgcagcctctaacccacctgcacagtattcttggctgattgatgggaacatccagcaacacacacaagagctctttatctccaacatcactgagaagaacagcggactctatacctgccaggccaataactcagccagtggccacagcaggactacagtcaagacaatcacagtctctgcggagctgcccaagccctccatctccagcaacaactccaaacccgtggaggacaaggatgctgtggccttcacctgtgaacctgaggctcagaacacaacctacctgtggtgggtaaatggtcagagcctcccagtcagtcccaggctgcagctgtccaatggcaacaggaccctcactctattcaatgtcacaagaaatgacgcaagagcctatgtatgtggaatccagaactcagtgagtgcaaaccgcagtgacccagtcaccctggatgtcctctatgggccggacacccccatcatttcccccccagactcgtcttacctttcgggagcgaacctcaacctctcctgccactcggcctctaacccatccccgcagtattcttggcgtatcaatgggataccgcagcaacacacacaagttctctttatcgccaaaatcacgccaaataataacgggacctatgcctgttttgtctctaacttggctactggccgcaataattccatagtcaagagcatcacagtctctgcatctggaacttctcctggtctctcagctggggccactgtcggcatcatgattggagtgctggttggggttgctctgatatagcagccctggtgtagtttcttcatttcaggaagactgacagttgttttgcttcttccttaaagcatttgcaacagctacagtctaaaattgcttctttaccaaggatatttacagaaaagactctgaccagagatcgagaccatcctagccaacatcgtgaaaccccatctctactaaaaatacaaaaatgagctgggcttggtggcgcgcacctgtagtcccagttactcgggaggctgaggcaggagaatcgcttgaacccgggaggtggagattgcagtgagcccagatcgcaccactgcactccagtctggcaacagagcaagactccatctcaaaaagaaaagaaaagaagactctgacctgtactcttgaatacaagtttctgataccactgcactgtctgagaatttccaaaactttaatgaactaactgacagcttcatgaaactgtccaccaagatcaagcagagaaaataattaatttcatgggactaaatgaactaatgaggattgctgattctttaaatgtcttgtttcccagatttcaggaaactttttttcttttaagctatccactcttacagcaatttgataaaatatacttttgtgaacaaaaattgagacatttacattttctccctatgtggtcgctccagacttgggaaactattcatgaatatttatattgtatggtaatatagttattgcacaagttcaataaaaatctgctctttgtataacagaaaaa

SEQ ID NO: 87 - protein, 702 aa, Homo sapiens
MESPSAPPHRWCIPWQRLLLTASLLTFWNPPTTAKLTIESTPFNVAEGKEVLLLVHNLPQHLFGYSWYKGERVDGNRQIIGYVIGTQQATPGPAYSGREIIYPNASLLIQNIIQNDTGFYTLHVIKSDLVNEEATGQFRVYPELPKPSISSNNSKPVEDKDAVAFTCEPETQDATYLWWVNNQSLPVSPRLQLSNGNRTLTLFNVTRNDTASYKCETQNPVSARRSDSVILNVLYGPDAPTISPLNTSYRSGENLNLSCHAASNPPAQYSWFVNGTFQQSTQELFIPNITVNNSGSYTCQAHNSDTGLNRTTVTTITVYAEPPKPFITSNNSNPVEDEDAVALTCEPEIQNTTYLWWVNNQSLPVSPRLQLSNDNRTLTLLSVTRNDVGPYECGIQNELSVDHSDPVILNVLYGPDDPTISPSYTYYRPGVNLSLSCHAASNPPAQYSWLIDGNIQQHTQELFISNITEKNSGLYTCQANNSASGHSRTTVKTITVSAELPKPSISSNNSKPVEDKDAVAFTCEPEAQNTTYLWWVNGQSLPVSPRLQLSNGNRTLTLFNVTRNDARAYVCGIQNSVSANRSDPVTLDVLYGPDTPIISPPDSSYLSGANLNLSCHSASNPSPQYSWRINGIPQQHTQVLFIAKITPNNNGTYACFVSNLATGRNNSIVKSITVSASGTSPGLSAGATVGIMIGVLVGVALI

SEQ ID NO: 88 - DNA, 5296 bp, Homo sapiens
ttttttttagtattaagcagaggccgggggcccctggcctccgcttactctggagaaaaagaagagaggcttccagaggcaacttgtcaaaacaggactggcgccttggaggcgctgtggggccacccaaattgatataattaagccccaaccgcctcttcccgcctcatttcagcctcaccaccatcatggatagagttctgagcagagctgacaaagaaaggctgctagaacttctaaaacttcccagacaactatggggggattttggaagaatgcagcaggcatataagcagcagtcactgctactgcacccagacaaaggtggaagccatgccttaatgcaggaattgaacagtctctggggaacatttaaaactgaagtatacaatctgagaatgaatctaggaggaaccggcttccaggtaagaaggctacatgcggatgggtggaatctaagtaccaaagacacctttggtgatagatactaccagcggttctgcagaatgcctcttacctgcctagtaaatgttaaatacagctcatgtagttgtatattatgcctgcttagaaagcaacatagagagctcaaagacaaatgtgatgccaggtgcctagtacttggagaatgtttttgtcttgaatgttacatgcaatggtttggaacaccaacccgagatgtgctgaacctgtatgcagacttcattgcaagcatgcctatagactggctggacctggatgtgcacagcgtgtataatccaagtaagtatcaagagggcgggtgggtatttacggcctatattcttacagggctctccccctagaacggcggagcgaggaactgaggagagcggccacagtccactacacgatgactactggtcattcagctatggaagcaagtacttcacaagggaatggaatgatttcttcagaaagtgggaccccagctaccagtcgccgcctaagactgccgagtcttctgagcaacccgacctattctgttatgaggagccactcctatcccccaacccgagttctccaacagatacacccgcacatactgctggaagaagacgaaatccttgtgttgctgagcccgatgacagcatatccccggacccccccagaactcctgtatccagaaagcgaccaagaccagctggagccactggaggaggaggaggaggagtacatgccaatggaggatctgtatttggacatcctaccggaggaacaagtaccccagctcatccccccccctatcattcccagggcgggtctgagtccatgggagggtctgattcttcgggatttgcagagggctcatttcgatccgatcctagatgcgagtcagagaatgagagctactcacagagctgctctcagagctcattcaatgcaacgccacctaagaaggctagggaggaccctgctcctagtgactttcctagcagccttactgggtatttgtctcatgctatttattctaataaaacgttcccggcatttctagtatactccaccaaagagaaatgcaaacaattatatgataccatagggaagttcaggcccgaattcaaatgcctggtccattatgaggaggggggcatgctgttctttctaactatgactaagcacagggtttcagcagttaagaattattgctctaagctttgcagcgtcagcttcctaatgtgtaaggcagtcaccaagcctatggaatgctatcaagttgtaaccgcagcaccatttcagttaataacagaaaataagccaggcctccaccaattcgagtttacagacgagccagaagaacagaaagcagtagactggattatggtagcagactttgcactagaaaacaaccttgatgatcccctgttaattatggggtattatcttgattttgccaaagaggttccttcatgcataaagtgtagcaaagaggaaacccgcctccaaatacattggaaaaaccatagaaagcatgcagagaatgcagacctcttcctgaattgtaaagctcaaaagacaatctgtcagcaggcagctgacggagtcttggcatccaggagactgaaattagtagagtgtacccgcagccagctattaaaggagagattgcaacagtctctcctcaggctaaaagaacttggctcctccgatgctctactctacctagcaggtgtcgcttggtaccagtgtcttttagaggactttcctcaaaccctgtttaagatgcttaagctgctaacagaaaatgtgccaaaacgacgcaacatactttttagaggaccagttaattcaggaaagacaggcctagcagccgcgcttattagcctgttaggaggcaagtctctcaacataaattgccctgcagataaacttgcttttgagcttggtgtggcacaggaccagtttgtggtctgttttgaagatgtaaagggtcaaatagccttgaacaaacaactgcagccagggatgggagtggctaatctagataatctcagggactacctggatgggagtgtaaaggtcaatctagaaaaaaagcacagcaacaaaaggtcacaactctttccaccctgtgtgtgtacaatgaatgaatatctcctaccacaaacagtatgggcccggtttcacatggtgttggatttcacctgcaaaccccatctggcccaatctcttgaaaagtgtgaatttttgcaaagggaaagaattattcagagtggagatacccttgccctattactcatatggaatttcacttcagatgtatttgatcctgatattcagggtcttgtgaaggaggttcgtgaccagtttgctagtgagtgctcctacagtttgttttgtgatatactttgtaatgtgcaagaaggcgacgaccccttgaaggacatatgtgaatatagctgaatacacagtttattgaataaacattaatttccaggaaatacagtctttgtttttccaaagcggtcaacatagcgcgtcatatcagggtcccccggtacaggttcagtcccatcatacactctaacctcctctacctgggtgttctccccttccatgggttggccctgcacttgggggagcatgttgttgaaaagggaacttatgagggaggccatgggatagggatttttgacccatctttttctcagggtgattttgaaatatctgggaagccctctccagtgatggacatcatagtttcttgtaactctcctgcccattatatctacacaggagaggtataggccctctcctttacagaggggcccaactccattttcatctaggagcacagttgtcagggtgtttgtgaactgcaggacgggtggagttgttgtgcctccagtgtaattgccaaagtaccttgtgttctcattttttgctggatctggatgccagatttcaactggatacattccgtccttatccagcttggccttgctaattggattcaggacttggtctttgttgaccatgtccttctttgtgattgttttgattgttactaccccttcttccttgtattttgttctggcatctgtcacaagtccctggaggtcaagcggttccccgcccacagcaaacacatgatattggctgccttccactggagtggaaattacttttgtgtttactgtatctgtgggtttgttgaacccatgcacatctaacagtgagccagagcccaccacctcggttttcactgagactgcctcccacatttgtagggtgtcacaggtgaggtcctcattgagcatgggaagctggagctttgccatactccatgtgggaagtgtattattttctggggaatcctctgtatctgatgtagccaaattaatccctctgctccaaccatagtattgccctccctctgttaggctttcaggggtgggtggctgccccattctggggttcagaaaagcttctatttctgtcacactgtctggccctgtcacaaggtccagcacctccataccccctttaataagcagtttgggaacgggtgcgggtcttggacaggcctttgtacattttgtctcgcatttagagacgccgctttttcttttgggggccatcttcctctatgactgttgcccaagtaggtgtgatatcaccgtacagccctagaattaaaggaagcatccagtcaggagtgactctttggtgggcaccacctggggcctgatagaactttatcacctcacctgactcatcctgtatatgtgctgcaggggtaggcccaccatttcccatgctcccttctatgcgattaaagagtgctctcctctgtggtggattaagacctagttgcctataatagtcacttagtgatgagtaccctgagctcactgatgaggcacctctgttgattgcatctatggctgactgaggagcattagaaaccacccaccgggtgttttcaagtagcctagctaggccatccaggaatgtatgtgtctgtcttacagttagttctcttacagctccttccagtctgtgttgtgtttcctgcacaaccatttgccacacatatcttcccacggaatgaagtaggccatggccccaatcatgtactacatttagagcatgagcaaactgattaactcctgggaagtatatatcgagaagggctggatcccgccatggtatcaacgccatatttctatttacagtagggacctcttcgttgtgtaggtaccgctgtattcctagggaaatagtagaggcaccttgaactgtctgcatcagccatatagcccccgctgttcgatttacaaacacaggcacagtactgacaaacccatacacctcctctgaaatacccatagttgctagggctgtctccgaactcattacaccctccaaagtcagagctgtaatttcgccatcaagggcagcgagggcttctccagataaaatagcttctgccgagagtcccgtaagggtagacacttcagctaatccctcgatgaggtctactagaatagtcagtgcggctcccattttgaaaattcacttacttgatcagcttcagaagatggcggagggcctccaacacagtaattttcctcccgactcttaaaatagaaaatgtcaagtcagttaagcaggaagtgactaactgaccgcagctggccgtgcgacatcctcttttagttagttgctaggcaactgccctccagagggcagtgtggttttgcaagaggaagcaaaaagcctctccacccaggcctagaatgtttccacccaatcattactatgacaacagctg

SEQ ID NO: 89 - protein, 782 aa, Homo sapiens
MDRVLSRADKERLLELLKLPRQLWGDFGRMQQAYKQQSLLLHPDKGGSHALMQELNSLWGTFKTEVYNLRMNLGGTGFQGSPPRTAERGTEESGHSPLHDDYWSFSYGSKYFTREWNDFFRKWDPSYQSPPKTAESSEQPDLFCYEEPLLSPNPSSPTDTPAHTAGRRRNPCVAEPDDSISPDPPRTPVSRKRPRPAGATGGGGGGVHANGGSVFGHPTGGTSTPAHPPPYHSQGGSESMGGSDSSGFAEGSFRSDPRCESENESYSQSCSQSSFNATPPKKAREDPAPSDFPSSLTGYLSHAIYSNKTFPAFLVYSTKEKCKQLYDTIGKFRPEFKCLVHYEEGGMLFFLTMTKHRVSAVKNYCSKLCSVSFLMCKAVTKPMECYQVVTAAPFQLITENKPGLHQFEFTDEPEEQKAVDWIMVADFALENNLDDPLLIMGYYLDFAKEVPSCIKCSKEETRLQIHWKNHRKHAENADLFLNCKAQKTICQQAADGVLASRRLKLVECTRSQLLKERLQQSLLRLKELGSSDALLYLAGVAWYQCLLEDFPQTLFKMLKLLTENVPKRRNILFRGPVNSGKTGLAAALISLLGGKSLNINCPADKLAFELGVAQDQFVVCFEDVKGQIALNKQLQPGMGVANLDNLRDYLDGSVKVNLEKKHSNKRSQLFPPCVCTMNEYLLPQTVWARFHMVLDFTCKPHLAQSLEKCEFLQRERIIQSGDTLALLLIWNFTSDVFDPDIQGLVKEVRDQFASECSYSLFCDILCNVQEGDDPLKDICEYS

SEQ ID NO: 90 - DNA, 1504 bp, Homo sapiens
cctaagatgagctttccatgtaaatttgtagccagcttccttctgattttcaatgtttcttccaaaggtgcagtctccaaagagattacgaatgccttggaaacctggggtgccttgggtcaggacatcaacttggacattcctagttttcaaatgagtgatgatattgacgatataaaatgggaaaaaacttcagacaagaaaaagattgcacaattcagaaaagagaaagagactttcaaggaaaaagatacatataagctatttaaaaatggaactctgaaaattaagcatctgaagaccgatgatcaggatatctacaaggtatcaatatatgatacaaaaggaaaaaatgtgttggaaaaaatatttgatttgaagattcaagagagggtctcaaaaccaaagatctcctggacttgtatcaacacaaccctgacctgtgaggtaatgaatggaactgaccccgaattaaacctgtatcaagatgggaaacatctaaaactttctcagagggtcatcacacacaagtggaccaccagcctgagtgcaaaattcaagtgcacagcagggaacaaagtcagcaaggaatccagtgtcgagcctgtcagctgtccagagaaaggtctggacatctatctcatcattggcatatgtggaggaggcagcctcttgatggtctttgtggcactgctcgttttctatatcaccaaaaggaaaaaacagaggagtcggagaaatgatgaggagctggagacaagagcccacagagtagctactgaagaaaggggccggaagccccaacaaattccagcttcaacccctcagaatccagcaacttcccaacatcctcctccaccacctggtcatcgttcccaggcacctagtcatcgtcccccgcctcctggacaccgtgttcagcaccagcctcagaagaggcctcctgctccgtcgggcacacaagttcaccagcagaaaggcccgcccctccccagacctcgagttcagccaaaacctccccatggggcagcagaaaactcattgtccccttcctctaattaaaaaagatagaaactgtctttttcaataaaaagcactgtggatttctgccctcctgatgtgcatatccgtacttccatgaggtgttttctgtgtgcagaacattgtcacctcctgaggctgtgggccacagccacctctgcatcttcgaactcagccatgtggtcaacatctggagtttttggtctcctcagagagctccatcacaccagtaaggagaagcaatataagtgtgattgcaagaatggtagaggaccgagcacagaaatcttagagatttcttgtcccctctcaggtcatgtgtagatgcgataaatcaagtgattggtgtgcctgggtctcactacaagcagcctatctgcttaagagactctggagtttcttatgtgccctggtggacacttgcccaccatcctgtgagtaaaagtgaaataaaagctttgac

SEQ ID NO: 91 - protein, 351 aa, Homo sapiens
MSFPCKFVASFLLIFNVSSKGAVSKEITNALETWGALGQDINLDIPSFQMSDDIDDIKWEKTSDKKKIAQFRKEKETFKEKDTYKLFKNGTLKIKHLKTDDQDIYKVSIYDTKGKNVLEKIFDLKIQERVSKPKISWTCINTTLTCEVMNGTDPELNLYQDGKHLKLSQRVITHKWTTSLSAKFKCTAGNKVSKESSVEPVSCPEKGLDIYLIIGICGGGSLLMVFVALLVFYITKRKKQRSRRNDEELETRAHRVATEERGRKPQQIPASTPQNPATSQHPPPPPGHRSQAPSHRPPPPGHRVQHQPQKRPPAPSGTQVHQQKGPPLPRPRVQPKPPHGAAENSLSPSSN

SEQ ID NO: 92 - DNA, 2026 bp, Homo sapiens
tggagttcacacacacatctacatggagatcacacacactctacatggagctcacacatacgcctcaacatggagatcacacaacatcagagatgacacacacaacacagagatcacacaagtcaacatggagatctctctctctctacacacacacacacacacacacacacacacacacacacacactggcacaagcccagcattcatggcgcagccatctcttgtacttgctagcaaaacaccacctgtggaaagtcagctcaaacttccaacctcatccctcacaaagggggaatggagggtttggttttggctttcactggagtctgcaacaagaactggcatcatgctgcccatttcccgcctctccccacccagacccctgcctcagggacgcctgtcctcagcccagccctcagctgcagccaggccttcagcctccgtaacccccgctcagggtccccaccccctgcagccctgtccctccagatgcatggccttgtcctgtgtgggggtggccgagagcactgccccagccctgggtaccttgggcaggaagctggcagaggccagggctgccattcaaacaggggcaggtggttttgccaggaggaagttgacagttcaacttcaaacatgggtgacgcaggccccacactgcctgctccccgtcccacccctccctgagcacgccaccccgccctctccctctctgagagcgagatacccggccagacaccctcacctgcggtgcccagctgcccaggctgaggcaagagaaggccagaaaccatgcccatggggtctctgcaaccgctggccaccttgtacctgctggggatgctgggtgagtacccctcccaggtgtcctgcgaacacccgggctcgctccagtgcaaggaaggagttcccagttttacccaaggctgactctgggatccacatgtcagccctctggagcgttgtggagatttggggccactgggatccctgcctgcccccactaagccgcagcttggccctctgtcctgcatgtcccacccgccaggagcacaaccttgcctctctcatgcgctgttgagaaccctgctttacccttccagtgcaagagagactgcaggggggacccgcatttgatggggcccagacaacttgattcctaggctgagttggattttagcagagcattcaggcctccctctgcgaggtcccccactgacagcccagtctttacttggtcgcctccagagacatggaaactcgccgtctccgaggcagctctgatgatgctctggacagacagcgggccgaggcagggtgggagccgcctctgaggacgatgtctgagcaaatgtcaaggactcatagcggaagtcctagggcctctcatgcccagtcctgggtcaagtcccagaggggcccagccaggccggctgggatgagtacacgctgggcctgctctcactccagccctgggttgtaagcccaaccctgtgtgacctcggataggtccccaagcctctccaggccttgatctccccatttatgaaatgtgggggttgggggtgtgaactggatgaggcctgacccacttcctgaggatttagaaggtctggcagggtgacagaggtgcgtgactctgggctggaaacaggaggatgcgagcagcttccaggctggcagggagagggtcccgaggcctcgcctgcctgagcagggagcctcagcagccttctagggaaaccggtgtgcaggtgtgagtgtgggggaatgcatgtgtgtgtgtctgtgtgcatgtgtgtgagaactgtgtgtgggggaatgtgtgagtctatgtgtgtctgtgtgagtctgtgtgtacgtgtgtgagaactgtgttggggggtaatgtgtgactctgtgtgtgagtctgtgtgtgagtctctggccatgtgtgtgagtactgtgtgtaggggaatgtgtgagtctgtgtgtgagtctgtgtgtgagtctctgggcatgtgtgtgagtactgtctgggggg

SEQ ID NO: 93 - protein, 495 aa, Homo sapiens
MPMGSLQPLATLYLLGMLVASCLGRLSWYDPDFQARLTRSNSKCQGQLEVYLKDGWHMVCSQSWGRSSKQWEDPSQASKVCQRLNCGVPLSLGPFLVTYTPQSSIICYGQLGSFSNCSHSRNDMCHSLGLTCLEPQKTTPPTTRPPPTTTPEPTAPPRLQLVAQSGGQHCAGVVEFYSGSLGGTISYEAQDKTQDLENFLCNNLQCGSFLKHLPETEAGRAQDPGEPREHQPLPIQWKIQNSSCTSLEHCFRKIKPQKSGRVLALLCSGFQPKVQSRLVGGSSICEGTVEVRQGAQWAALCDSSSARSSLRWEEVCREQQCGSVNSYRVLDAGDPTSRGLFCPHQKLSQCHELWERNSYCKKVFVTCQDPNPAGLAAGTVASIILALVLLVVLLVVCGPLAYKKLVKKFRQKKQRQWIGPTGMNQNMSFHRNHTATVRSHAENPTASHVDNEYSQPPRNSRLSAYPALEGVLHRSSMQPDNSSDSDYDLHGAQRL

SEQ ID NO: 94 - DNA, 1586 bp, Homo sapiens
gaggacaggtttgtgcgctggacgcaagcaccaggcgcagcctcgctcgccgacacccggccagaacgtgttacgagtcagtttttagtgaaaaaacattgagctaggagccaagacccatctcttcactattttggtattgtgcaagtcatcttacctctctggatctcagttgtctcatctgtaaaaaggagataaaaattatttacctgcctgaacatgaggtggaggaccatcctgctacagtattgctttctcttgattacatgtttacttactgctcttgaagctgtgcctattgacatagacaagacaaaagtacaaaatattcaccctgtggaaagtgcgaagatagaaccaccagatactggactttattatgatgaatatctcaagcaagtgattgatgtgctggaaacagataaacacttcagagaaaagctccagaaagcagacatagaggaaataaagagtgggaggctaagcaaagaactggatttagtaagtcaccatgtgaggacaaaacttgatgaactgaaaaggcaagaagtaggaaggttaagaatgttaattaaagctaagttggattcccttcaagatataggcatggaccaccaagctcttctaaaacaatttgatcacctaaaccacctgaatcctgacaagtttgaatccacagatttagatatgctaatcaaagcggcaacaagtgatctggaacactatgacaagactcgtcatgaagaatttaaaaaatatgaaatgatgaaggaacatgaaaggagagaatatttaaaaacattgaatgaagaaaagagaaaagaagaagagtctaaatttgaagaaatgaagaaaaagcatgaaaatcaccctaaagttaatcacccaggaagcaaagatcaactaaaagaggtatgggaagagactgatggattggatcctaatgactttgaccccaagacatttttcaaattacatgatgtcaatagtgatggattcctggatgaacaagaattagaagccctatttactaaagagttggagaaagtatatgaccctaaaaatgaagaggatgatatggtagaaatggaagaagaaaggcttagaatgagggaacatgtaatgaatgaggttgatactaacaaagacagattggtgactctggaggagtttttgaaagccacagaaaaaaaagaattcttggagccagatagctgggagacattagatcagcaacagttcttcacagaggaagaactaaaagaatatgaaaatattattgctttacaagaaaatgaacttaagaagaaggcagatgagcttcagaaacaaaaagaagagctacaacgtcagcatgatcaactggaggctcagaagctggaatatcatcaggtcatacagcagatggaacaaaaaaaattacaacaaggaattcctccatcagggccagctggagaattgaagtttgagccacacatttaaagtctgaagtccaccagaacttggaagaaagctgttaactcaacatctatttcatctttttagctcccttcccttttctctgctcaataaatattttaaaagca

SEQ ID NO: 95 - protein, 420 aa, Homo sapiens
MRWRTILLQYCFLLITCLLTALEAVPIDIDKTKVQNIHPVESAKIEPPDTGLYYDEYLKQVIDVLETDKHFREKLQKADIEEIKSGRLSKELDLVSHHVRTKLDELKRQEVGRLRMLIKAKLDSLQDIGMDHQALLKQFDHLNHLNPDKFESTDLDMLIKAATSDLEHYDKTRHEEFKKYEMMKEHERREYLKTLNEEKRKEEESKFEEMKKKHENHPKVNHPGSKDQLKEVWEETDGLDPNDFDPKTFFKLHDVNSDGFLDEQELEALFTKELEKVYDPKNEEDDMVEMEEERLRMREHVMNEVDTNKDRLVTLEEFLKATEKKEFLEPDSWETLDQQQFFTEEELKEYENIIALQENELKKKADELQKQKEELQRQHDQLEAQKLEYHQVIQQMEQKKLQQGIPPSGPAGELKFEPHI

SEQ ID NO: 96 - DNA, 1204 bp, Homo sapiens
ggggtgcaaagaagagacagcagcgcccagcttggaggtgctaactccagaggccagcatcagcaactgggcacagaaaggagccgcctgggcagggaccatggcacggccacatccctggtggctgtgcgttctggggaccctggtggggctctcagctactccagcccccaagagctgcccagagaggcactactgggctcagggaaagctgtgctgccagatgtgtgagccaggaacattcctcgtgaaggactgtgaccagcatagaaaggctgctcagtgtgatccttgcataccgggggtctccttctctcctgaccaccacacccggccccactgtgagagctgtcggcactgtaactctggtcttctcgttcgcaactgcaccatcactgccaatgctgagtgtgcctgtcgcaatggctggcagtgcagggacaaggagtgcaccgagtgtgatcctcttccaaacccttcgctgaccgctcggtcgtctcaggccctgagcccacaccctcagcccacccacttaccttatgtcagtgagatgctggaggccaggacagctgggcacatgcagactctggctgacttcaggcagctgcctgcccggactctctctacccactggccaccccaaagatccctgtgcagctccgattttattcgcatccttgtgatcttctctggaatgttccttgttttcaccctggccggggccctgttcctccatcaacgaaggaaatatagatcaaacaaaggagaaagtcctgtggagcctgcagagccttgtcgttacagctgccccagggaggaggagggcagcaccatccccatccaggaggattaccgaaaaccggagcctgcctgctccccctgagccagcacctgcggtagctgcactacagccctggcctccacccccaccccgccgaccatccaagggagagtgagacctggcagccacaactgcagtcccatcctcttgtcagggccctttcctgtgtacacgtgacagagtgccttttcgagactggcagggacgaggacaaatatggatgaggtggagagtgggaagcaggagcccagccagctgcgcctgcgctgcaggagggcgggggctctggttgtaaaacacacttcctgctgcgaaagacccacatgctacaagacgggcaaaataaagtgacagatgaccacc

SEQ ID NO: 97 - protein, 260 aa, Homo sapiens
MARPHPWWLCVLGTLVGLSATPAPKSCPERHYWAQGKLCCQMCEPGTFLVKDCDQHRKAAQCDPCIPGVSFSPDHHTRPHCESCRHCNSGLLVRNCTITANAECACRNGWQCRDKECTECDPLPNPSLTARSSQALSPHPQPTHLPYVSEMLEARTAGHMQTLADFRQLPARTLSTHWPPQRSLCSSDFIRILVIFSGMFLVFTLAGALFLHQRRKYRSNKGESPVEPAEPCRYSCPREEEGSTIPIQEDYRKPEPACSP

SEQ ID NO: 98 - DNA, 1514 bp, Homo sapiens
agactctcaggccttggcaggtgcgtctttcagttcccctcacacttcgggttcctcggggaggaggggctggaaccctagcccatcgtcaggacaaagatgctcaggctgctcttggctctcaacttattcccttcaattcaagtaacaggaaacaagattttggtgaagcagtcgcccatgcttgtagcgtacgacaatgcggtcaaccttagctgcaagtattcctacaatctcttctcaagggagttccgggcatcccttcacaaaggactggatagtgctgtggaagtctgtgttgtatatgggaattactcccagcagcttcaggtttactcaaaaacggggttcaactgtgatgggaaattgggcaatgaatcagtgacattctacctccagaatttgtatgttaaccaaacagatatttacttctgcaaaattgaagttatgtatcctcctccttacctagacaatgagaagagcaatggaaccattatccatgtgaaagggaaacacctttgtccaagtcccctatttcccggaccttctaagcccttttgggtgctggtggtggttggtggagtcctggcttgctatagcttgctagtaacagtggcctttattattttctgggtgaggagtaagaggagcaggctcctgcacagtgactacatgaacatgactccccgccgccccgggcccacccgcaagcattaccagccctatgccccaccacgcgacttcgcagcctatcgctcctgacacggacgcctatccagaagccagccggctggcagcccccatctgctcaatatcactgctctggataggaaatgaccgccatctccagccggccacctcagcccctgttgggccaccaatgccaatttttctcgagtgactagaccaaatatcaagatcattttgagactctgaaatgaagtaaaagagatttcctgtgacaggccaagtcttacagtgccatggcccacattccaacttaccatgtacttagtgacttgactgagaagttagggtagaaaacaaaaagggagtggattctgggagcctcttccctttctcactcacctgcacatctcagtcaagcaaagtgtggtatccacagacattttagttgcagaagaaaggctaggaaatcattccttttggttaaatgggtgtttaatcttttggttagtgggttaaacggggtaagttagagtagggggagggataggaagacatatttaaaaaccattaaaacactgtctcccactcatgaaatgagccacgtagttcctatttaatgctgttttcctttagtttagaaatacatagacattgtcttttatgaattctgatcatatttagtcattttgaccaaatgagggatttggtcaaatgagggattccctcaaagcaatatcaggtaaaccaagttgctttcctcactccctgtcatgagacttcagtgttaatgttcacaatatactttcgaaagaataaaatagttc

SEQ ID NO: 99 - protein, 220 aa, Homo sapiens
MLRLLLALNLFPSIQVTGNKILVKQSPMLVAYDNAVNLSCKYSYNLFSREFRASLHKGLDSAVEVCVVYGNYSQQLQVYSKTGFNCDGKLGNESVTFYLQNLYVNQTDIYFCKIEVMYPPPYLDNEKSNGTIIHVKGKHLCPSPLFPGPSKPFWVLVVVGGVLACYSLLVTVAFIIFWVRSKRSRLLHSDYMNMTPRRPGPTRKHYQPYAPPRDFAAYRS

SEQ ID NO: 100 - DNA, 672 bp, Homo sapiens
atggcttgccttggatttcagcggcacaaggctcagctgaacctggctgccaggacctggccctgcactctcctgttttttcttctcttcatccctgtcttctgcaaagcaatgcacgtggcccagcctgctgtggtactggccagcagccgaggcatcgccagctttgtgtgtgagtatgcatctccaggcaaagccactgaggtccgggtgacagtgcttcggcaggctgacagccaggtgactgaagtctgtgcggcaacctacatgacggggaatgagttgaccttcctagatgattccatctgcacgggcacctccagtggaaatcaagtgaacctcactatccaaggactgagggccatggacacgggactctacatctgcaaggtggagctcatgtacccaccgccatactacctgggcataggcaacggaacccagatttatgtaattgatccagaaccgtgcccagattctgacttcctcctctggatccttgcagcagttagttcggggttgtttttttatagctttctcctcacagctgtttctttgagcaaaatgctaaagaaaagaagccctcttacaacaggggtctatgtgaaaatgcccccaacagagccagaatgtgaaaagcaatttcagccttattttattcccatcaattga

SEQ ID NO: 101 - protein, 223 aa, Homo sapiens
MACLGFQRHKAQLNLAARTWPCTLLFFLLFIPVFCKAMHVAQPAVVLASSRGIASFVCEYASPGKATEVRVTVLRQADSQVTEVCAATYMTGNELTFLDDSICTGTSSGNQVNLTIQGLRAMDTGLYICKVELMYPPPYYLGIGNGTQIYVIDPEPCPDSDFLLWILAAVSSGLFFYSFLLTAVSLSKMLKKRSPLTTGVYVKMPPTEPECEKQFQPYFIPIN

SEQ ID NO: 102 - DNA, 2339 bp, Homo sapiens
acgaaggccacgcgcccggcgcccctgagccggccgagcggcgacggaccgcgagatgaggaaaatgaggcccaaagaagtgatgccacttggttaaggtcccagagcaggtcagaatcagacctaggatcagaaacctggctcctggctcctgctccctactcttctaaggatcgctgtcctgacagaagagaactcctctttcctaaaatggagtcgagtaaaaagatggactctcctggcgcgctgcagactaacccgccgctaaagctgcacactgaccgcagtgctgggacgccagtttttgtccctgaacaaggaggttacaaggaaaagtttgtgaagaccgtggaggacaagtacaagtgtgagaagtgccacctggtgctgtgcagcccgaagcagaccgagtgtgggcaccgcttctgcgagagctgcatggcggccctgctgagctcttcaagtccaaaatgtacagcgtgtcaagagagcatcgttaaagataaggtgtttaaggataattgctgcaagagagaaattctggctcttcagatctattgtcggaatgaaagcagaggttgtgcagagcagttaatgctgggacatctggtgcatttaaaaaatgattgccattttgaagaacttccatgtgtgcgtcctgactgcaaagaaaaggtcttgaggaaagacctgcgagaccacgtggagaaggcgtgtaaataccgggaagccacatgcagccactgcaagagtcaggttccgatgatcgcgctgcagaaacacgaagacaccgactgtccctgcgtggtggtgtcctgccctcacaagtgcagcgtccagactctcctgaggagcgagttgagtgcacacttgtcagagtgtgtcaatgcccccagcacctgtagttttaagcgctatggctgcgtttttcaggggacaaaccagcagatcaaggcccacgaggccagctccgccgtgcagcacgtcaacctgctgaaggagtggagcaactcgctcgaaaagaaggtttccttgttgcagaatgaaagtgtagaaaaaaacaagagcatacaaagtttgcacaatcagatatgtagctttgaaattgaaattgagagacaaaaggaaatgcttcgaaataatgaatccaaaatccttcatttacagcgagtgatagacagccaagcagagaaactgaaggagcttgacaaggagatccggcccttccggcagaactgggaggaagcagacagcatgaagagcagcgtggagtccctccagaaccgcgtgaccgagctggagagcgtggacaagagcgcggggcaagtggctcggaacacaggcctgctggagtcccagctgagccggcatgaccagatgctgagtgtgcacgacatccgcctagccgacatggacctgggcttccaggtcctggagaccgccagctacaatggagtgctcatctggaagattcgcgactacaagcggcggaagcaggaggccgtcatggggaagaccctgtccctttacagccagcctttctacactggttactttggctataagatgtgtgccagggtctacctgaacggggacgggatggggaaggggacgcacttgtcgctgttttttgtcatcatgcgtggagaatatgatgccctgcttccttggccgtttaagcagaaagtgacactcatgctgatggatcaggggtcctctcgacgtcatttgggagatgcattcaagcccgaccccaacagcagcagcttcaagaagcccactggagagatgaatatcgcctctggctgcccagtctttgtggcccaaactgttctagaaaatgggacatatattaaagatgatacaatttttattaaagtcatagtggatacttcggatctgcccgatccctgataagtagctggggaggtggatttagcagaaggcaactcctctgggggatttgaaccggtctgtcttcactgaggtcctcgcgctcagaaaaggaccttgtgagacggaggaagcggcagaaggcggacgcgtgccggcgggaggagccacgcgagagcacacctgacacgttttataatagactagccacacttcactctgaagaattatttatccttcaacaagataaatattgctgtcagagaaggttttcattttcatttttaaagatctagttaattaaggtggaaaacatatatgctaaacaaaagaaacatgatttttcttccttaaacttgaacaccaaaaaaacacacacacacacacacgtggggatagctggacatgtcagcatgttaagtaaaaggagaatttatgaaatagta

SEQ ID NO: 103 - protein, 567 aa, Homo sapiens [sequence omitted]

SEQ ID NO: 104 - DNA, 1874 bp, Homo sapiens
gaattccggcaggcacaaactcatccatccccagttgattggaagaaacaacgatgactcctgggaagacctcattggtgtcactgctactgctgctgagcctggaggccatagtgaaggcaggaatcacaatcccacgaaatccaggatgcccaaattctgaggacaagaacttcccccggactgtgatggtcaacctgaacatccataaccggaataccaataccaatcccaaaaggtcctcagattactacaaccgatccacctcaccttggaatctccaccgcaatgaggaccctgagagatatccctctgtgatctgggaggcaaagtgccgccacttgggctgcatcaacgctgatgggaacgtggactaccacatgaactctgtccccatccagcaagagatcctggtcctgcgcagggagcctccacactgccccaactccttccggctggagaagatactggtgtccgtgggctgcacctgtgtcaccccgattgtccaccatgtggcctaagagctctggggagcccacactccccaaagcagttagactatggagagccgacccagcccctcaggaaccctcatccttcaaagacagcctcatttcggactaaactcattagagttcttaaggcagtttgtccaattaaagcttcagaggtaacacttggccaagatatgagatctgaattacctttccctctttccaagaaggaaggtttgactgagtaccaatttgcttcttgtttacttttttaagggctttaagttatttatgtatttaatatgccctgagataactttggggtataagattccattttaatgaattacctactttattttgtttgtctttttaaagaagataagattctgggcttgggaattttattatttaaaaggtaaaacctgtatttatttgagctatttaaggatctatttatgtttaagtatttagaaaaaggtgaaaaagcactattatcagttctgcctaggtaaatgtaagatagaattaaatggcagtgcaaaatttctgagtctttacaacatacggatatagtatttcctcctctttgtttttaaaagttataacatggctgaaaagaaagattaaacctactttcatatgtattaatttaaattttgcaatttgttgaggttttacaagagatacagcaagtctaactctctgttccattaaacccttataataaaatccttctgtaataataaagtttcaaaagaaaatgtttatttgttctcattaaatgtattttagcaaactcagctcttccctattgggaagagttatgcaaattctcctataagcaaaacaaagcatgtctttgagtaacaatgacctggaaatacccaaaattccaagttctcgatttcacatgccttcaagactgaacaccgactaaggttttcatactattagccaatgctgtagacagaagcattttgataggaatagagcaaataagataatggccctgaggaatggcatgtcattattaaagatcatatggggaaaatgaaaccctccccaaaatacaagaagttctgggaggagacattgtcttcagactacaatgtccagtttctcccctagactcaggcttcctttggagattaaggcccctcagagatcaacagaccaacatttttctcttcctcaagcaacactcctagggcctggcttctgtctgatcaaggcaccacacaacccagaaaggagctgatggggcagaatgaactttaagtatgagaaaagttcagcccaagtaaaataaaaactcaatcacattcaattccagagtagtttcaagtttcacatcgtaaccattttcgcccggaattc

SEQ ID NO: 105 - protein, 155 aa, Homo sapiens
MTPGKTSLVSLLLLLSLEAIVKAGITIPRNPGCPNSEDKNFPRTVMVNLNIHNRNTNTNPKRSSDYYNRSTSPWNLHRNEDPERYPSVIWEAKCRHLGCINADGNVDYHMNSVPIQQEILVLRREPPHCPNSFRLEKILVSVGCTCVTPIVHHVA

SEQ ID NO: 106 - DNA, 3120 bp, Homo sapiens
ggggccgagccctccgcgacgccacccgggccatgggggccgcacgcagcccgccgtccgctgtcccggggcccctgctggggctgctcctgctgctcctgggcgtgctggccccgggtggcgcctccctgcgactcctggaccaccgggcgctggtctgctcccagccggggctaaactgcacggtcaagaatagtacctgcctggatgacagctggattcaccctcgaaacctgaccccctcctccccaaaggacctgcagatccagctgcactttgcccacacccaacaaggagacctgttccccgtggctcacatcgaatggacactgcagacagacgccagcatcctgtacctcgagggtgcagagttatctgtcctgcagctgaacaccaatgaacgtttgtgcgtcaggtttgagtttctgtccaaactgaggcatcaccacaggcggtggcgttttaccttcagccactttgtggttgaccctgaccaggaatatgaggtgaccgttcaccacctgcccaagcccatccctgatggggacccaaaccaccagtccaagaatttccttgtgcctgactgtgagcacgccaggatgaaggtaaccacgccatgcatgagctcaggcagcctgtgggaccccaacatcaccgtggagaccctggaggcccaccagctgcgtgtgagcttcaccctgtggaacgaatctacccattaccagatcctgctgaccagttttccgcacatggagaaccacagttgctttgagcacatgcaccacatacctgcgcccagaccagaagagttccaccagcgatccaacgtcacactcactctacgcaaccttaaagggtgctgtcgccaccaagtgcagatccagcccttcttcagcagctgcctcaatgactgcctcagacactccgcgactgtttcctgcccagaaatgccagacactccagaaccaattccggactacatgcccctgtgggtgtactggttcatcacgggcatctccatcctgctggtgggctccgtcatcctgctcatcgtctgcatgacctggaggctagctgggcctggaagtgaaaaatacagtgatgacaccaaatacaccgatggcctgcctgcggctgacctgatccccccaccgctgaagcccaggaaggtctggatcatctactcagccgaccaccccctctacgtggacgtggtcctgaaattcgcccagttcctgctcaccgcctgcggcacggaagtggccctggacctgctggaagagcaggccatctcggaggcaggagtcatgacctgggtgggccgtcagaagcaggagatggtggagagcaactctaagatcatcgtcctgtgctcccgcggcacgcgcgccaagtggcaggcgctcctgggccggggggcgcctgtgcggctgcgctgcgaccacggaaagcccgtgggggacctgttcactgcagccatgaacatgatcctcccggacttcaagaggccagcctgcttcggcacctacgtagtctgctacttcagcgaggtcagctgtgacggcgacgtccccgacctgttcggcgcggcgccgcggtacccgctcatggacaggttcgaggaggtgtacttccgcatccaggacctggagatgttccagccgggccgcatgcaccgcgtaggggagctgtcgggggacaactacctgcggagcccgggcggcaggcagctccgcgccgccctggacaggttccgggactggcaggtccgctgtcccgactggttcgaatgtgagaacctctactcagcagatgaccaggatgccccgtccctggacgaagaggtgtttgaggagccactgctgcctccgggaaccggcatcgtgaagcgggcgcccctggtgcgcgagcctggctcccaggcctgcctggccatagacccgctggtcggggaggaaggaggagcagcagtggcaaagctggaacctcacctgcagccccggggtcagccagcgccgcagcccctccacaccctggtgctcgccgcagaggagggggccctggtggccgcggtggagcctgggcccctggctgacggtgccgcagtccggctggcactggcgggggagggcgaggcctgcccgctgctgggcagcccgggcgctgggcgaaatagcgtcctcttcctccccgtggaccccgaggactcgccccttggcagcagcacccccatggcgtctcctgacctccttccagaggacgtgagggagcacctcgaaggcttgatgctctcgctcttcgagcagagtctgagctgccaggcccaggggggctgcagtagacccgccatggtcctcacagacccacacacgccctacgaggaggagcagcggcagtcagtgcagtctgaccagggctacatctccaggagctccccgcagccccccgagggactcacggaaatggaggaagaggaggaagaggagcaggacccagggaagccggccctgccactctctcccgaggacctggagagcctgaggagcctccagcggcagctgcttttccgccagctgcagaagaactcgggctgggacacgatggggtcagagtcagaggggcccagtgcatgagggcggctccccagggaccgcccagatcccagctttgagagaggagtgtgtgtgcacgtattcatctgtgtgtacatgtctgcatgtgtatatgttcgtgtgtgaaatgtaggctttaaaatgtaaatgtctggattttaatcccaggcatccctcctaacttttctttgtgcagcggtctggttatcgtctatccccaggggaatccacacagcccgctcccaggagctaatggtagagcgtccttgaggctccattattcgttcattcagcatttattgtgcacctactatgtggcgggcatttgggataccaagataaattgcatgcggcatggccccagccatgaaggaacttaaccgctagtgccgaggacacgttaaacgaacaggatgggccgggcacggtggctcacgcctgtaatcccagcacactgggaggccgaggcaggtggatcactctgaggtcaggagtttgagccagcctg

SEQ ID NO: 107 - protein, 866 aa, Homo sapiens
MGAARSPPSAVPGPLLGLLLLLLGVLAPGGASLRLLDHRALVCSQPGLNCTVKNSTCLDDSWIHPRNLTPSSPKDLQIQLHFAHTQQGDLFPVAHIEWTLQTDASILYLEGAELSVLQLNTNERLCVRFEFLSKLRHHHRRWRFTFSHFVVDPDQEYEVTVHHLPKPIPDGDPNHQSKNFLVPDCEHARMKVTTPCMSSGSLWDPNITVETLEAHQLRVSFTLWNESTHYQILLTSFPHMENHSCFEHMHHIPAPRPEEFHQRSNVTLTLRNLKGCCRHQVQIQPFFSSCLNDCLRHSATVSCPEMPDTPEPIPDYMPLWVYWFITGISILLVGSVILLIVCMTWRLAGPGSEKYSDDTKYTDGLPAADLIPPPLKPRKVWIIYSADHPLYVDVVLKFAQFLLTACGTEVALDLLEEQAISEAGVMTWVGRQKQEMVESNSKIIVLCSRGTRAKWQALLGRGAPVRLRCDHGKPVGDLFTAAMNMILPDFKRPACFGTYVVCYFSEVSCDGDVPDLFGAAPRYPLMDRFEEVYFRIQDLEMFQPGRMHRVGELSGDNYLRSPGGRQLRAALDRFRDWQVRCPDWFECENLYSADDQDAPSLDEEVFEEPLLPPGTGIVKRAPLVREPGSQACLAIDPLVGEEGGAAVAKLEPHLQPRGQPAPQPLHTLVLAAEEGALVAAVEPGPLADGAAVRLALAGEGEACPLLGSPGAGRNSVLFLPVDPEDSPLGSSTPMASPDLLPEDVREHLEGLMLSLFEQSLSCQAQGGCSRPAMVLTDPHTPYEEEQRQSVQSDQGYISRSSPQPPEGLTEMEEEEEEEQDPGKPALPLSPEDLESLRSLQRQLLFRQLQKNSGWDTMGSESEGPSA

SEQ ID NO: 108 - DNA, 578 bp, Homo sapiens
ctttagcaccagttggtgtaggagttgagacctacttcacagtagttctgtggacaatcacaatgggaatccaaggagggtctgtcctgttcgggctgctgctcgtcctggctgtcttctgccattcaggtcatagcctgcagtgctacaactgtcctaacccaactgctgactgcaaaacagccgtcaattgttcatctgattttgatgcgtgtctcattaccaaagctgggttacaagtgtataacaagtgttggaagtttgagcattgcaatttcaacgacgtcacaacccgcttgagggaaaatgagctaacgtactactgctgcaagaaggacctgtgtaactttaacgaacagcttgaaaatggtgggacatccttatcagagaaaacagttcttctgctggtgactccatttctggcagcagcctggagccttcatccctaagtcaacaccaggagagcttctcccaaactccccgttcctgcgtagtccgctttctcttgctgccacattctaaaggcttgatattttccaaatggatcctgttgggaaagaataaaattagcttgagca

SEQ ID NO: 109 - protein, 128 aa, Homo sapiens
MGIQGGSVLFGLLLVLAVFCHSGHSLQCYNCPNPTADCKTAVNCSSDFDACLITKAGLQVYNKCWKFEHCNFNDVTTRLRENELTYYCCKKDLCNFNEQLENGGTSLSEKTVLLLVTPFLAAAWSLHP

SEQ ID NO: 110 - DNA, 1048 bp, Homo sapiens
ctgtgaaagaaggaagcatgtggtccagaggttgggattcgtgtctggctctggaattgctactgctgcctctgtcactcctggtgaccagcattcaaggtcacttggtacatatgaccgtggtctccggcagcaacgtgactctgaacatctctgagagcctgcctgagaactacaaacaactaacctggttttatactttcgaccagaagattgtagaatgggattccagaaaatctaagtactttgaatccaaatttaaaggcagggtcagacttgatcctcagagtggcgcactgtacatctctaaggtccagaaagaggacaacagcacctacatcatgagggtgttgaaaaagactgggaatgagcaagaatggaagatcaagctgcaagtgcttgaccctgtacccaagcctgtcatcaaaattgagaagatagaagacatggatgacaactgttatctgaaactgtcatgtgtgatacctggcgagtctgtaaactacacctggtatggggacaaaaggcccttcccaaaggagctccagaacagtgtgcttgaaaccacccttatgccacataattactccaggtgttatacttgccaagtcagcaattctgtgagcagcaagaatggcaccgtctgcctcagtccaccctgtaccctggcccggtcctttggagtagaatggattgcaagttggctagtggtcacggtgcccaccattcttggcctgttacttacctgagatgagctcttttaactcaagcgaaacttcaaggccagaagatcttgcctgttggtgatcatgctcctcagcaggacagagactgtataggctgaccagaagcatgctgctgaattatcaacgaggattttcaagttaacttttaaatactggttattatttaattttatatccctttgttgttttgtagtacacagagattatagagatacacatgcttttttcccaaaattgtgacaacattatgtggaatcttttattatttttaaaataaaaagatataattataaaaaaaaaaa

SEQ ID NO: 111 - protein, 243 aa, Homo sapiens [sequence omitted]

SEQ ID NO: 112 - DNA, 1040 bp, Homo sapiens
cgacgagccatggttgctgggagcgacgcggggcgggccctgggggtcctcagcgtggtctgcctgctgcactgctttggtttcatcagctgtttttcccaacaaatatatggtgttgtgtatgggaatgtaactttccatgtaccaagcaatgtgcctttaaaagaggtcctatggaaaaaacaaaaggataaagttgcagaactggaaaattctgaattcagagctttctcatcttttaaaaatagggtttatttagacactgtgtcaggtagcctcactatctacaacttaacatcatcagatgaagatgagtatgaaatggaatcgccaaatattactgataccatgaagttctttctttatgtgcttgagtctcttccatctcccacactaacttgtgcattgactaatggaagcattgaagtccaatgcatgataccagagcattacaacagccatcgaggacttataatgtactcatgggattgtcctatggagcaatgtaaacgtaactcaaccagtatatattttaagatggaaaatgatcttccacaaaaaatacagtgtactcttagcaatccattatttaatacaacatcatcaatcattttgacaacctgtatcccaagcagcggtcattcaagacacagatatgcacttatacccataccattagcagtaattacaacatgtattgtgctgtatatgaatggtattctgaaatgtgacagaaaaccagacagaaccaactccaattgattggtaacagaagatgaagacaacagcataactaaattattttaaaaactaaaaagccatctgatttctcatttgagtattacaatttttgaacaactgttggaaatgtaacttgaagcagctgctttaagaagaaatacccactaacaaagaacaagcattagttttggctgtcatcaacttattatatgactaggtgcttgctttttttgtcagtaaattgtttttactgatgatgtagatacttttgtaaataaatgtaaatatgtacacaagtg

SEQ ID NO: 113 - protein, 250 aa, Homo sapiens
MVAGSDAGRALGVLSVVCLLHCFGFISCFSQQIYGVVYGNVTFHVPSNVPLKEVLWKKQKDKVAELENSEFRAFSSFKNRVYLDTVSGSLTIYNLTSSDEDEYEMESPNITDTMKFFLYVLESLPSPTLTCALTNGSIEVQCMIPEHYNSHRGLIMYSWDCPMEQCKRNSTSIYFKMENDLPQKIQCTLSNPLFNTTSSIILTTCIPSSGHSRHRYALIPIPLAVITTCIVLYMNGILKCDRKPDRTNSN

SEQ ID NO: 114 - DNA, 1358 bp, Homo sapiens
tggaagactgtgaagcagaggcgcccagggctatggctgacgctatcacgtatgcagacctgcgctttgtgaaagtgcccctgaagaacagcgcatctaaccatctaggacaggactgtgaggcctatgaagatggggaactcacctacgagaacgtgcaagtgtctccagtcccaggagggccaccaggcttggcttcccctgcactagcggacaaagcaggggtcgggtcagagcaaccaactgcgacctggagctctgtgaagtcgtctgctctcaggcagattccccgctgtcctacggtctgcttgcaaaacttcttgcttggccttctcctgtcctgtctgatgttaggggtggctgtcatctgcctgggagttcgctatctgcaggtgtctcagcagttccaggaggggaccaggatttgggaagccaccaatagcagcctgcagcagcagctcagggagaagataagtcagctggggcagaaggaggtggagcttcaggagtctcagaaagagctgatctcgagccaggacacattacaggagaagcagaggactcacaaggacactgagcagcaactacaagcctgccaggctgagagagcgaagaccaaggagaacctgaaaactgaggaggagcggaggagggacctggaccagaggttgacaagcacgcgggagacactgaggcgcttgtcctcctgttcatcagacacctgctgtccatgcggatggattccatatcaggaaaggtgcttttacatctcacataccctcagaagtctggaggagagccaaaaatactgcacatctctgtcctccaaactggcagcattcgatgaaccttctaagtattactatgaatacctctctgacgccccccaggtttctctgcccagcggcttagaggagttgctagatcgttcgaagtcatattggatacagatgagcaagaagtggaggcatgactatgactctcaaagccgatattgtgacaagataaaaaaatattaccagaagtggaaaagaacattttctgagtgtgcagagcttcacccctgcatttgtgagtcggaggctttcaggtttcctgatgggatccatctgaactgaaccggatacttgaacaagaccttgtgacctacatccttaacctaaggcctgccaatttttaagactgctattcctccagcactccctcactctcgggcatgcccagctaagggatgacctgctgcttgcttgaaagctgctccagaaactggactactcttgggaagagtaaagaagcctccagaaaagacttgaccttccttaaatacttcccaaactagagatgggtcaggggagggc

SEQ ID NO: 115 - protein, 359 aa, Homo sapiens
MADAITYADLRFVKVPLKNSASNHLGQDCEAYEDGELTYENVQVSPVPGGPGLASPALADKAGVGSEQPTATWSSVKSSALRQIPRCPTVCLQNFLLGLLLSCLMLGVAVICLGVRYLQVSQQFQEGTRIWEATNSSLQQQLREKISQLGQKEVEQESQKELISSQDTLQEKQRTHKDTEQQLQACQAERAKTKENLKTEEERRRDLDQRLTSTRETLRRLSSCSSDTCCPCGWIPYQERCFYISHTLRSLEESQKYCTSLSSKLAAFDEPSKYYYEYLSDAPQVSLPSGLEELLDRSKSYWIQMSKKWRHDYDSQSRYCDKIKKYYQKWKRTFSECAELHPCICESEAFRFPDGIHLN

SEQ ID NO: 116 - DNA, 856 bp, Mus musculus
gaagttgcctaaagctccaggggatttccctgccctccgagaagaggcccagttcttcccctgcatcggacatccccgaggttctaagggcaggtcaaggcaggcagaagcttcaaaagctcggctgaggaggctacagcttcccgctgccttcaggccgctgcttccgtgcagggatgccggaggaaggtcgcccttgcccctgggttcgctggagcgggaccgcgttccagcgccaatggccatggctgctgctggtggtgtttattactgtgttttgctgttggtttcattgtagcggactactcagtaagcagcaacagaggctgctggagcaccctgagccgcacacagctgagttacagctgaatctcacagttcctcggaaggaccccacactgcgctggggagcaggcccagccttgggaaggtccttcacacacggaccagagctggaggagggccatctgcgtatccatcaagatggcctctacaggctgcatatccaggtgacactggccaactgctcttccccaggcagcaccctgcagcacagggccaccctggctgtgggcatctgctcccccgctgcgcacggcatcagcttgctgcgtgggcgctttggacaggactgtacagtggcattacagcgcctgacatacctggtccacggagatgtcctctgtaccaacctcaccctgcctctgctgccgtcccgcaacgctgatgagaccttctttggagttcagtggatatgcccttgaccacaactccaggatgacttgtgaatattttttttcttttcaagttctacgtatttataaatgtatatagtacacataaaaaaaaaaaaaaa

SEQ ID NO: 117 - protein, 195 aa, Mus musculus
MPEEGRPCPWVRWSGTAFQRQWPWLLLVVFITVFCCWFHCSGLLSKQQQRLLEHPEPHTAELQLNLTVPRKDPTLRWGAGPALGRSFTHGPELEEGHLRIHQDGLYRLHIQVTLANCSSPGSTLQHRATLAVGICSPAAHGISLLRGRFGQDCTVALQRLTYLVHGDVLCTNLTLPLLPSRNADETFFGVQWICP

SEQ ID NO: 118 - DNA, 909 bp, Homo sapiens
atgcggctgggcagtcctggactgctcttcctgctcttcagcagccttcgagctgatactcaggagaaggaagtcagagcgatggtaggcagcgacgtggagctcagctgcgcttgccctgaaggaagccgttttgatttaaatgatgtttacgtatattggcaaaccagtgagtcgaaaaccgtggtgacctaccacatcccacagaacagctccttggaaaacgtggacagccgctaccggaaccgagccctgatgtcaccggccggcatgctgcggggcgacttctccctgcgcttgttcaacgtcaccccccaggacgagcagaagtttcactgcctggtgttgagccaatccctgggattccaggaggttttgagcgttgaggttacactgcatgtggcagcaaacttcagcgtgcccgtcgtcagcgccccccacagcccctcccaggatgagctcaccttcacgtgtacatccataaacggctaccccaggcccaacgtgtactggatcaataagacggacaacagcctgctggaccaggctctgcagaatgacaccgtcttcttgaacatgcggggcttgtatgacgtggtcagcgtgctgaggatcgcacggacccccagcgtgaacattggctgctgcatagagaacgtgcttctgcagcagaacctgactgtcggcagccagacaggaaatgacatcggagagagagacaagatcacagagaatccagtcagtaccggcgagaaaaacgcggccacgtggagcatcctggctgtcctgtgcctgcttgtggtcgtggcggtggccataggctgggtgtgcagggaccgatgcctccaacacagctatgcaggtgcctgggctgtgagtccggagacagagctcactggccacgtttga

SEQ ID NO: 119 - protein, 302 aa, Homo sapiens
MRLGSPGLLFLLFSSLRADTQEKEVRAMVGSDVELSCACPEGSRFDLNDVYVYWQTSESKTVVTYHIPQNSSLENVDSRYRNRALMSPAGMLRGDFSLRLFNVTPQDEQKFHCLVLSQSLGFQEVLSVEVTLHVAANFSVPVVSAPHSPSQDELTFTCTSINGYPRPNVYWINKTDNSLLDQALQNDTVFLNMRGLYDVVSVLRIARTPSVNIGCCIENVLLQQNLTVGSQTGNDIGERDKITENPVSTGEKNAATWSILAVLCLLVVVAVAIGWVCRDRCLQHSYAGAWAVSPETELTGHV

SEQ ID NO: 120 - DNA, 1424 bp, Homo sapiens
aggagccttaggaggtacggggagctcgcaaatactccttttggtttattcttaccaccttgcttctgtgttccttgggaatgctgctgtgcttatgcatctggtctctttttggagctacagtggacaggcatttgtgacagcactatgggactgagtaacattctctttgtgatggccttcctgctctctggtgctgctcctctgaagattcaagcttatttcaatgagactgcagacctgccatgccaatttgcaaactctcaaaaccaaagcctgagtgagctagtagtattttggcaggaccaggaaaacttggttctgaatgaggtatacttaggcaaagagaaatttgacagtgttcattccaagtatatgggccgcacaagttttgattcggacagttggaccctgagacttcacaatcttcagatcaaggacaagggcttgtatcaatgtatcatccatcacaaaaagcccacaggaatgattcgcatccaccagatgaattctgaactgtcagtgcttgctaacttcagtcaacctgaaatagtaccaatttctaatataacagaaaatgtgtacataaatttgacctgctcatctatacacggttacccagaacctaagaagatgagtgttttgctaagaaccaagaattcaactatcgagtatgatggtattatgcagaaatctcaagataatgtcacagaactgtacgacgtttccatcagcttgtctgtttcattccctgatgttacgagcaatatgaccatcttctgtattctggaaactgacaagacgcggcttttatcttcacctttctctatagagcttgaggaccctcagcctcccccagaccacattccttggattacagctgtacttccaacagttattatatgtgtgatggttttctgtctaattctatggaaatggaagaagaagaagcggcctcgcaactcttataaatgtggaaccaacacaatggagagggaagagagtgaacagaccaagaaaagagaaaaaatccatatacctgaaagatctgatgaagcccagcgtgtttttaaaagttcgaagacatcttcatgcgacaaaagtgatacatgtttttaattaaagagtaaagcccatacaagtattcattttttctaccctttcctttgtaagttcctgggcaacctttttgatttcttccagaaggcaaaaagacattaccatgagtaataagggggctccaggactccctctaagtggaatagcctccctgtaactccagctctgctccgtatgccaagaggagactttaattctcttactgcttcttttcacttcagagcacacttatgggccaagcccagcttaatggctcatgacctggaaataaaatttaggaccaataaaaaaaaaaaaaaaaaaaa

SEQ ID NO: 121 - protein, 323 aa, Homo sapiens
MGLSNILFVMAFLLSGAAPLKIQAYFNETADLPCQFANSQNQSLSELVVFWQDQENLVLNEVYLGKEKFDSVHSKYMGRTSFDSDSWTLRLHNLQIKDKGLYQCIIHHKKPTGMIRIHQMNSELSVLANFSQPEIVPISNITENVYINLTCSSIHGYPEPKKMSVLLRTKNSTIEYDGIMQKSQDNVTELYDVSISLSVSFPDVTSNMTIFCILETDKTRLLSSPFSIELEDPQPPPDHIPWITAVLPTVIICVMVFCLILWKWKKKKRPRNSYKCGTNTMEREESEQTKKREKIHIPERSDEAQRVFKSSKTSSCDKSDTCF

SEQ ID NO: 122 - DNA, 1816 bp, Homo sapiens
cttctctgccagaagataccatttcaactttaacacagcatgatcgaaacatacaaccaaacttctccccgatctgcggccactggactgcccatcagcatgaaaatttttatgtatttacttactgtttttcttatcacccagatgattgggtcagcactttttgctgtgtatcttcatagaaggttggacaagatagaagatgaaaggaatcttcatgaagattttgtattcatgaaaacgatacagagatgcaacacaggagaaagatccttatccttactgaactgtgaggagattaaaagccagtttgaaggctttgtgaaggatataatgttaaacaaagaggagacgaagaaagaaaacagctttgaaatgcaaaaaggtgatcagaatcctcaaattgcggcacatgtcataagtgaggccagcagtaaaacaacatctgtgttacagtgggctgaaaaaggatactacaccatgagcaacaacttggtaaccctggaaaatgggaaacagctgaccgttaaaagacaaggactctattatatctatgcccaagtcaccttctgttccaatcgggaagcttcgagtcaagctccatttatagccagcctctgcctaaagtcccccggtagattcgagagaatcttactcagagctgcaaatacccacagttccgccaaaccttgcgggcaacaatccattcacttgggaggagtatttgaattgcaaccaggtgcttcggtgtttgtcaatgtgactgatccaagccaagtgagccatggcactggcttcacgtcctttggcttactcaaactctgaacagtgtcaccttgcaggctgtggtggagctgacgctgggagtcttcataatacagcacagcggttaagcccaccccctgttaactgcctatttataaccctaggatcctccttatggagaactatttattatacactccaaggcatgtagaactgtaataagtgaattacaggtcacatgaaaccaaaacgggccctgctccataagagcttatatatctgaagcagcaaccccactgatgcagacatccagagagtcctatgaaaagacaaggccattatgcacaggttgaattctgagtaaacagcagataacttgccaagttcagttttgtttctttgcgtgcagtgtctttccatggataatgcatttgatttatcagtgaagatgcagaagggaaatggggagcctcagctcacattcagttatggttgactctgggttcctatggccttgttggagggggccaggctctagaacgtctaacacagtggagaaccgaaacccccccccccccccccgccaccctctcggacagttattcattctctttcaatctctctctctccatctctctctttcagtctctctctctcaacctctttcttccaatctctctttctcaatctctctgtttccctttgtcagtctcttccctcccccagtctctcttctcaatccccctttctaacacacacacacacacacacacacacacacacacacacacacacacacacacacacacacacacagagtcaggccgttgctagtcagttctcttctttccaccctgtccctatctctaccactatagatgagggtgaggagtagggagtgcagccctgagcctgcccactcctcattacgaaatgactgtatttaaaggaaatctattgtatctacctgcagtctccattgtttccagagtgaacttgtaattatcttgttatttattttttgaataataaagacctcttaacattaaaa

SEQ ID NO: 123 - protein, 261 aa, Homo sapiens
MIETYNQTSPRSAATGLPISMKIFMYLLTVFLITQMIGSALFAVYLHRRLDKIEDERNLHEDFVFMKTIQRCNTGERSLSLLNCEEIKSQFEGFVKDIMLNKEETKKENSFEMQKGDQNPQIAAHVISEASSKTTSVLQWAEKGYYTMSNNLVTLENGKQLTVKRQGLYYIYAQVTFCSNREASSQAPFIASLCLKSPGRFERILLRAANTHSSAKPCGQQSIHLGGVFELQPGASVFVNVTDPSQVSHGTGFTSFGLLKL

SEQ ID NO: 124 - DNA, 1879 bp, Homo sapiens
gcctcgggaggtggtggagtgacctggccccagtgctgcgtccttatcagccgagccggtcccagctcttgctcctgcctgtttgcctggaaatggccacgcttctccttctccttggggtgctggtggtaagcccagacgctctggggagcacaacagcagtgcagacacccacctccggagagcctttggtctctactagcgagcccctgagctcaaagatgtacaccacttcaataacaagtgaccctaaggccgacagcactggggaccagacctcagccctacctccctcaacttccatcaatgagggatcccctctttggacttccattggtgccagcactggttcccctttacctgagccaacaacctaccaggaagtttccatcaagatgtcatcagtgccccaggaaacccctcatgcaaccagtcatcctgctgttcccataacagcaaactctctaggatcccacaccgtgacaggtggaaccataacaacgaactctccagaaacctccagtaggaccagtggagcccctgttaccacggcagctagctctctggagacctccagaggcacctctggaccccctcttaccatggcaactgtctctctggagacttccaaaggcacctctggaccccctgttaccatggcaactgactctctggagacctccactgggaccactggaccccctgttaccatgacaactggctctctggagccctccagcggggccagtggaccccaggtctctagcgtaaaactatctacaatgatgtctccaacgacctccaccaacgcaagcactgtgcccttccggaacccagatgagaactcacgaggcatgctgccagtggctgtgcttgtggccctgctggcggtcatagtcctcgtggctctgctcctgctgtggcgccggcggcagaagcggcggactggggccctcgtgctgagcagaggtggcaagcgtaacggggtggtggacgcctgggctgggccagcccaggtccctgaggagggggccgtgacagtgaccgtgggagggtccgggggcgacaagggctctgggttccccgatggggaggggtctagccgtcggcccacgctcaccactttctttggcagacggaagtctcgccagggctccctggcgatggaggagctgaagtctgggtcaggccccagcctcaaaggggaggaggagccactggtggccagtgaggatggggctgtggacgccccagctcctgatgagcccgaagggggagacggggctgccccttaagtgtcggtgaatagtgaggctggaggccggaatctcagccagcctccagcaccttccctctcaccatcccactgccccctcgctcccatgtttccacccggcaccctgatcctcacccgaatctcctttttttttttcttttgagacagagtttcgctttgtcgcccaggctggagtgcaatgcacgatctcagttcactgcaacctctgcctcctaagttcaggcgattctcctgcctcagcttcccgagtaactgagattacaggcacccaccaccatgcccagctgcttttttgtatttttggtagagatggggtttcaccatgttggctaggctggtctcaaactcctgacctcaggtgatctacctgcctcagcctcccaaagtgctgagattacagacatgagcctccgcgccttgcctcctcacccacctcttcactctgaatcctcatgaggcttctcagccctggatttcctgctgccatcctcacccagcacccacaactagcgcctgggcagggcagggctggcacctctcaacgtctgtggactgaatgaataaaccctcctcatccacccc

SEQ ID NO: 125 - protein, 400 aa, Homo sapiens
MATLLLLLGVLVVSPDALGSTTAVQTPTSGEPLVSTSEPLSSKMYTTSITSDPKADSTGDQTSALPPSTSINEGSPLWTSIGASTGSPLPEPTTYQEVSIKMSSVPQETPHATSHPAVPITANSLGSHTVTGGTITTNSPETSSRTSGAPVTTAASSLETSRGTSGPPLTMATVSLETSKGTSGPPVTMATDSLETSTGTTGPPVTMTTGSLEPSSGASGPQVSSVKLSTMMSPTTSTNASTVPFRNPDENSRGMLPVAVLVALLAVIVLVALLLLWRRRQKRRTGALVLSRGGKRNGVVDAWAGPAQVPEEGAVTVTVGGSGGDKGSGFPDGEGSSRRPTLTTFFGRRKSRQGSLAMEELKSGSGPSLKGEEEPLVASEDGAVDAPAPDEPEGGDGAAP

SEQ ID NO: 126 - DNA, 3567 bp, Homo sapiens
cgccatcccgcgctctgcggactgggaggcccgggccaggacgcgagtctgcgcagccgaggttccccagcgccccctgcagccgcgcgtaggcagagacggagcccggccctgcgcctccgcaccacgcccgggaccccacccagcggcccgtacccggagaagcagcgcgagcacccgaagctcccggctcggcggcagaaaccgggagtggggccgggcgagtgcgcggcatcccaggccggcccgaacgtccgcccgcggtgggccgacttcccctcctcttccctctctccttcctttagcccgctggcgccggacacgctgcgcctcatctcttggggcgttcttccccgttggccaaccgtcgcatcccgtgcaactttggggtagtggccgcttagtgttgaatgttccccaccgagagcgcatggcttgggaagcgaggcgcgaacccgggccccgaagccgccgtccgggagacggtgatgctgttgctgtgcctgggggtcccgaccggccgcccctacaacgtggacactgagagcgcgctgctttaccagggcccccacaacacgctgttcggctactcggtcgtgctgcacagccacggggcgaaccgatggctcctagtgggtgcgcccactgccaactggctcgccaacgcttcagtgatcaatcccggggcgatttacagatgcaggatcggaaagaatcccggccagacgtgcgaacagctccagctgggtagccctaatggagaaccttgtggaaagacttgtttggaagagagagacaatcagtggttgggggtcacactttccagacagccaggagaaaatggatccatcgtgacttgtgggcatagatggaaaaatatattttacataaagaatgaaaataagctccccactggtggttgctatggagtgccccctgatttacgaacagaactgagtaaaagaatagctccgtgttatcaagattatgtgaaaaaatttggagaaaattttgcatcatgtcaagctggaatatccagtttttacacaaaggatttaattgtgatgggggccccaggatcatcttactggactggctctctttttgtctacaatataactacaaataaatacaaggcttttttagacaaacaaaatcaagtaaaatttggaagttatttaggatattcagtcggagctggtcattttcggagccagcatactaccgaagtagtcggaggagctcctcaacatgagcagattggtaaggcatatatattcagcattgatgaaaaagaactaaatatcttacatgaaatgaaaggtaaaaagcttggatcgtactttggagcttctgtctgtgctgtggacctcaatgcagatggcttctcagatctgctcgtgggagcacccatgcagagcaccatcagagaggaaggaagagtgtttgtgtacatcaactctggctcgggagcagtaatgaatgcaatggaaacaaacctcgttggaagtgacaaatatgctgcaagatttggggaatctatagttaatcttggcgacattgacaatgatggctttgaagatgttgctatcggagctccacaagaagatgacttgcaaggtgctatttatatttacaatggccgtgcagatgggatctcgtcaaccttctcacagagaattgaaggacttcagatcagcaaatcgttaagtatgtttggacagtctatatcaggacaaattgatgcagataataatggctatgtagatgtagcagttggtgcttttcggtctgattctgctgtcttgctaaggacaagacctgtagtaattgttgacgcttctttaagccaccctgagtcagtaaatagaacgaaatttgactgtgttgaaaatggatggccttctgtgtgcatagatctaacactttgtttctcatataagggcaaggaagttccaggttacattgttttgttttataacatgagtttggatgtgaacagaaaggcagagtctccaccaagattctatttctcttctaatggaacttctgacgtgattacaggaagcatacaggtgtccagcagagaagctaactgtagaacacatcaagcatttatgcggaaagatgtgcgggacatcctcaccccaattcagattgaagctgcttaccaccttggtcctcatgtcatcagtaaacgaagtacagaggaattcccaccacttcagccaattcttcagcagaagaaagaaaaagacataatgaaaaaaacaataaactttgcaaggttttgtgcccatgaaaattgttctgctgatttacaggtttctgcaaagattgggtttttgaagccccatgaaaataaaacatatcttgctgttgggagtatgaagacattgatgttgaatgtgtccttgtttaatgctggagatgatgcatatgaaacgactctacatgtcaaactacccgtgggtctttatttcattaagattttagagctggaagagaagcaaataaactgtgaagtcacagataactctggcgtggtacaacttgactgcagtattggctatatatatgtagatcatctctcaaggatagatattagctttctcctggatgtgagctcactcagcagagcggaagaggacctcagtatcacagtgcatgctacctgtgaaaatgaagaggaaatggacaatctaaagcacagcagagtgactgtagcaatacctttaaaatatgaggttaagctgactgttcatgggtttgtaaacccaacttcatttgtgtatggatcaaatgatgaaaatgagcctgaaacgtgcatggtggagaaaatgaacttaactttccatgttatcaacactggcaatagtatggctcccaatgttagtgtggaaataatggtaccaaattcttttagcccccaaactgataagctgttcaacattttggatgtccagactactactggagaatgccactttgaaaattatcaaagagtgtgtgcattagagcagcaaaagagtgcaatgcagaccttgaaaggcatagtccagttcttgtccaagactgataagaggctattgtactgcataaaagctgatccacattgtttaaatttcttgtgtaattttgggaaaatggaaagtggaaaagaagccagtgttcatatccaactggaaggccggccatccattttagaaatggatgagacttcagcactcaagtttgaaataagagcaacaggttttccagagccaaatccaagagtaattgaactaaacaaggatgagaatgttgcgcatgttctactggaaggactacatcatcaaagacccaaacgttatttcaccatagtgattatttcaagtagcttgctacttggacttattgtacttctgttgatctcatatgttatgtggaaggctggcttctttaaaagacaatacaaatctatcctacaagaagaaaacagaagagacagttggagttatatcaacagtaaaagcaatgatgattaaggacttctttcaaattgagagaatggaaaacagcccgccc

SEQ ID NO: 127 - protein, 1038 aa, Homo sapiens [sequence omitted]

SEQ ID NO: 128 - DNA, 8743 bp, Homo sapiens
ggatcctctcgcctcggcctcctaaagtattgggattacaggcatgagcctctgtgcctggctgtaactgacatgttttaagcaggggaatgacatgctctagtgaaagccagtctgggcagctgggtagctaatgaggggattagagagattttgttgaatgaaaggcagattgagtcctgctactcgcccccttcattccccttcattcatgcctcattcttccgcctcccagccgcctcaactggccaaagggaagtggaggccctgccacctgtagggagggtcccctggggcttgcccacagcaaacaggaagtcacagcctggtgagatgggcctgggaatcagccactgagaaagtgggtctcttgggtccctgaattctttttctgagtccctgcagcagtgaaaaagacacagaggcacatagagagtgacagagaaagagagagacagagaggagaggcatggggcagaataagaacagatttaggagttagaactcctgggttcttttaaaacaatttttcttttagagacagggtcttgttgtgttgcccggactggagcacagtggctattcccaggcataatcatggtgcactgcagccttgaactcctgggctcaagcgatccttctacctcagcctcccaaggacctgggaccataggcgtgtaccactgtgcctggcttttgcctggttttaaactgaggcagtatgacttgagctcttaggcattaattgaagctgtatctcattaactgagggcttatgatgtgctggacactgggctaatagtgctgaacatattgtcatttttaatcttcacaaacaatatttgtataggactgttttcttttcttttttttttttgaaacagagtctcactctggtgcccaggctggagtgcagtggtgtgatctcggctcactgcaacctccgcctcctggtttccagtgattctcctgcctcagcctcctaagtagctgggattacaggtgtgcgccaccatgcccggctaatttttttttttttttttgagaaggagtctatgtgcccagcattgttctagagcacttgcaattagtggtgaacaacacggtctctactccaaggggctcacattcttgtgcagaaaacagaaatgaacaaataaacacacaagatcatttcccgtggtagtgagagctgggatgaaaataaaacagcgtggcagggaggaggcaagtgttgtgagtctggagggttcctggagaatggggcctgaggcgtgaccaccgccttcctctctggggggactgcctgccgcccccgcagacacccatggttgagtgccctccaggcccctgcctgccccagcatcccctgcgcgaagctgggtgccccggagagtctgaccaccatgccacctcctcgcctcctcttcttcctcctcttcctcacccccatggaagtcaggcccgaggaacctctagtggtgaaggtggaaggtatgtccaaagggcagaaagggaagggattgaggctggaaacttgagttgtggctgggtgtccttggctgagtaacttaccctctctgagcctccattttcttatttgtaaaattcaggaaagggttggaaggactctgccggctcctccactcccagcttttggagtcctctgctctataacctggtgtgaggagtcggggggcttggaggtcccccccacccatgcccacacctctctccctctctctccacagagggagataacgctgtgctgcagtgcctcaaggggacctcagatggccccactcagcagctgacctggtctcgggagtccccgcttaaacccttcttaaaactcagcctggggctgccaggcctgggaatccacatgaggcccctggcatcctggcttttcatcttcaacgtctctcaacagatggggggcttctacctgtgccagccggggcccccctctgagaaggcctggcagcctggctggacagtcaatgtggagggcagcggtgagggccgggctggggcaggggcaggaggagagaagggaggccaccatggacagaagaggtccgcggccacaatggagctggagagaggggctggagggattgagggcgaaactcggagctaggtgggcagactcctggggcttcgtggcttcagtatgagctgcttcctgtccctctacctctcactgtcttctctctctctgcgggtctttgtctctatttatctctgtctttgagtctctatctctctccctctcctgggtgtctctgcatttggttctgggtctcttcccaggggagctgttccggtggaatgtttcggacctaggtggcctgggctgtggcctgaagaacaggtcctcagagggccccagctccccttccgggaagctcatgagccccaagctgtatgtgtgggccaaagaccgccctgagatctgggagggagagcctccgtgtgtcccaccgagggacagcctgaaccagagcctcagccagggtatggtgatgactggggagatgccgggaagcgggggtccagagacagaggggaggggaaactgaagaggtgaaaccctgaggatcaggctttccttgtcttatctctccctgtcccagacctcaccatggcccctggctccacactctggctgtcctgtggggtaccccctgactctgtgtccaggggccccctctcctggacccatgtgcaccccaaggggcctaagtcattgctgagcctagagctgaaggacgatcgcccggccagagatatgtgggtaatggagacgggtctgttgttgccccgggccacagctcaagacgctggaaagtattattgtcaccgtggcaacctgaccatgtcattccacctggagatcactgctcggccaggtagagtttctctcaactgggaggcatctgtgtgggggtactgggaagaagtggaagccagtcaatcttagattcccccaacccgagggctactcccagcctcaccccaaaccccaacttccacacagaacactgactccaagtctttcttttttttgacagagtctcgctctgttgcctaggctggagtgcagtggtgccatcttgtcttggctcactgcaacctccgcctcccaggttcaagtgattcccctgcctcagcctcctgagtagctgggattacaggtgcccaccaccacgcctggctaattttttttttttttttgagacggagtcttgcactgtcacccaggctggagtgcagtggcacgatctcagctcactgcaacctccaccttccaggttcaagtgattctcctgcctcagcctcccgagtagctgggattaaagcctggctaattttttttgtatttttagtagagatggggtttcattatgttggccaggctggtctcaaactcctgacctcgtgatccacccgcctcggcctcccaaagtgctgggattacagacatgagccacagggccgggccaagcctaattttgtatttttagtagagatggggtttctccctgttggaccaggctggtcttgaactcctgacttcaggtgatctgcctgccttggcctcccaaagtactgggattacaggcataagccaccgcacctggcctagacttcaagtctttcttccctcgcttccaagacactacttttctgggtcttcacctaccattgcttgcgcctgcccaccagcttgggtggagtcttccttcctccccaactcctcactcttggagccctgggccctcttcttatccctgtctgcacactttcctatttgaacttgactctcaatggcttcttgggtcaccatgccttggtgactctattccaggctccatactcagccatctcctgtgccatttgatatcccatggacacctcaggctcaacagatacaaaatcaaactcaatgtcttccccaagtatagtcttcttggtggcccagtgtaagcagagggcaccaccacctgctccctcgcccaggctaagaacctgggcatccttctttttcctcaccccgtccaacaaactggtcacagtgttctgccaattctctctccatgcaatcctatcatgctatcctaactgcaattcacaaacccaaccccaactttcactccaaacttgatccaagcaatgtgctggatcccaactgtaaccttgcaaactcaactctgcccttcactttgaccgtgactatccttaattgcagcaggaaactgatcattatgctcccctcaatccacacattgcctctgagtacagccatggtttgtccacgatttgctcaaagacactgcccatgtcctgtgccagggtctgtgacaatccctgacctcctgggacatggctccttagagagaggagagcctttctcacagcttgggactttgagtctgtgtctttttttttttcttgagacggagttttgctgtggttgcccaggctggagtgcagtgatctcggctcactgaaacctccgcctcccgggttcaaacgattctcctgcctcagcctcccaagtagctgggattacaggcacccaccaccatgcccagctaatttttttgtatttttagtagagatggggtttcaccatgttggccaggctggtctcgaactcctgacctcaggtgatccacccgcctttgcctcccaaagtgctgggattacaggcgtcaaccaccgcgcccggccgagtctgtgtcttgcctctgtgcctcagacttgcggttccttgagatctcaggattgggacgtaagatgccagcctggggtcctcgtctcatagccccttccccctagtactatggcactggctgctgaggactggtggctggaaggtctcagctgtgactttggcttatctgatcttctgcctgtgttcccttgtgggcattcttcatcttcaaagaggtgagtcatgtccccagtgggtctgtccaaaccctactccatcttccccaggataagccggctctggccagtctgacaaccatctttctttcctcccatccctcccttcaagaccccagaatcctgttctccccagtcttcctctagcctccctcaaacttcccaagcctcttgcaattttttttttttttttgagacagggtctcattctgtcaccccagctggagtgcagtggcacaatctgagctcactgtaacctctgcctcccaggcttaagtgattcttgtgcttcagcctcccgagtacctgggactacaagtgtatgccaccacacccggccaattttttatatttttagtagagacgaggtttcaccatgttggccagactggtctcgaactcttgacctcaaatgatccgcccacctcggcctcccaaagtgctgggattacaggcacgagccaccgcgcccgtccgcctcgcaatttgaactcctgtctcctttgttgaaccaagtgacctccccagcacctggccccacaaatcctcaccctgccaagcagcccctcctctgatcacgccctttaactcccaccagccctggtcctgaggaggaaaagaaagcgaatgactgaccccaccaggaggtaatgcaaccagtgcaccccgcggtaacaccctccaccttcactttatgccttgcacttactgtttcctctgcccaggggttctttgctccgtctctactgtttcaaatactgcccaacctcaaagcccagctccaaagctacctcctctgtgaagaactccttggaaatgatcatctcagactcctctattggctgtcccagcacaagtgatcacgtttaacttctgaaggcctggacagaatcttgagtgggtccgccattccattccaagtcggccctcaccgtgcacttcctcttctcccgccagattcttcaaagtgacgcctcccccaggaagcgggccccagaaccagtacgggaacgtgctgtctctccccacacccacctcaggcctcggtaagaggcaccgcccctccagcctatagctccgccccagatccggggctccacccccactctcctcatccctccaatccgctgtgcgccaagccttctggagctcggaactccgcccccggggcggggagtcccgcccagctatgagccccgcctctagaaccagaccccgcctccagggctcagagccacgcccccaggacccagagcctgaagtcgtaatcaagagcagaacttcgccccagaactgaaggcctcggccctagatttagattccgccccagggttcaaggccgggttcctagacccagagtccattcgcagagcccaaaacatcctcttcccgtgccccgccgcgcggacccttagccttgaccgcccccatctcttctgaccccgtcttacaatgcccctctcaccaggacgcgcccagcgttgggccgcaggcctggggggcactgccccgtcttatggaaacccgagcagcgacgtccaggcggatggagccttggggtcccggagcccgccgggagtgggtgaatgactgggagagggaagggtcgttccccacatggagggggttggagcggtctgtggcccgaatagtggactgggccctggaggagagggggcatgactcggttccccatccccatccccaaacccccaggcccagaagaagaggaaggggagggctatgaggaacctgacagtgaggaggactccgagttctatgagaacgactccaaccttgggcaggaccagctctcccagggtaaggctgccctcccccgtggccccccacctctgcggtggcctgtggactcccatggacacccctccttctacaccagatggcagcggctacgagaaccctgaggatgagcccctgggtcctgaggatgaagactccttctccaacggtaacttggggcctttgtgggacctcagagacttaggtgtaattgcagcgctgtgacactcctagaaggggatccctggagttctctctcttctgccacagctgagtcttatgagaacgaggatgaagagctgacccagccggtcgccaggacaatgggtgtgtgtgaggatggcaacagtccaggggggaggcggaggacacctggaggccaggaggaatagtaacctccctcttccctttccagacttcctgagccctcatgggtcagcctgggaccccagccgggaagcaacctccctgggtgagagatgctttcaatcagactgccttgcccagcttgggtgacctggcctcagctctgacaccagatccaactttgacctgaccctgaccccaaacccgaacccaatcctgtgactcctctcacctcaacactgagccccatcccccatcctgagccccatcccccatcctgacccccaatatttaccccctccctaactgtgaatatcaacaccgatcccaatgcagtatcagcctggacttgatctccacctcacctcagccccagtgcagacctcaacttggaccccagcttactctgcagcttcttcatgactctgactccgactccctccagtttcttctttttctttttcttttttttgagacggagtctccctctgttgcccaggctggagtgcagttgccacctctgcctcctaggttcaagcgattctcatgcctcagcctcctgagtagctgggattatagacgtttgccaccacacctggctaatttttgtattttcagtagagacagggtttcgccatgttggccagactggtctccaactcctggcctctagtgatctgcccgcctttggcttcccaaagtgctgggattacaggcatgagccaccacgcccagcccagttctgttcttgaccccttccttagccataatctaacccatatctaaccctgaccctacagctaactggggccccaaactcaatgctaaccaaatcaccccttcccagcacagcatgggtaatgctcctcaccttcctctgcccctcagtcttcctccttaccgtaggctgtacttcccatgccctagcctccaattctccatcccccgcccaagcagggtcccagtcctatgaggatatgagaggaatcctgtatgcagccccccagctccgctccattcggggccagcctggacccaatcatgaggaaggtgggtgcttctgccgctgtcccctgctgtcccctgggctgactttgccttccagcctacttccagtgccacccatgttctcctcctccctggtcctatccagatgcagactcttatgagaacatggataatcccgatgggccagacccagcctggggaggagggggccgcatgggcacctggagcaccaggtgatcctcaggtggccaggtgagctgggactgcccctagggaaagcggggagggagggagataggcacggatggcagtggctgctggctttcagggagggagagggaacagggttcctagggcctggtgggcagggggaggactgctggacccctccccatcaccgtttcttctgcatagcctggatctcctcaagtccccaagattcacacctgactctgaaatctgaagacctcgagcagatgatgccaacctctggagcaatgttgcttaggatgtgtgcatgtgtgtaagtgtgtgtgtgtgtgtgtgtgtgtatacatgccagtgacacttccagtcccctttgtattccttaaataaactcaatgagctc

SEQ ID NO: 129 - protein, 556 aa, Homo sapiens [sequence omitted]

SEQ ID NO: 130 - DNA, 1146 bp, Homo sapiens
cctcaatgacactcatggaggaaatgctgagagaagcattcagatgcatgacacaaggtaagactgccaaaaatcttgttcttgctctcctcattttgttatttgttttatttttaggagttttgagagcaaaatgacaacacccagaaattcagtaaatgggactttcccggcagagccaatgaaaggccctattgctatgcaatctggtccaaaaccactcttcaggaggatgtcttcactggtgggccccacgcaaagcttcttcatgagggaatctaagactttgggggctgtccagattatgaatgggctcttccacattgccctggggggtcttctgatgatcccagcagggatctatgcacccatctgtgtgactgtgtggtaccctctctggggaggcattatgtatattatttccggatcactcttggcagcaacggagaaaaactctaggaagtgtttggtcaaaggaaaaatgataatgaattcattgagcctctttgctgccatttctggaatgattctttcaatcatggacatacttaatattaaaatttcccattttttaaaaatggagagtctgaattttattagagctcacacaccatatattaacatatacaactgtgaaccagctaatccctctgagaaaaactccccatctacccaatactgttacagcatacaatctctgttcttgggcattttgtcagtgatgctgatctttgccttcttccaggaacttgtaatagctggcatcgttgagaatgaatggaaaagaacgtgctccagacccaaatctaacatagttctcctgtcagcagaagaaaaaaaagaacagactattgaaataaaagaagaagtggttgggctaactgaaacatcttcccaaccaaagaatgaagaagacattgaaattattccaatccaagaagaggaagaagaagaaacagagacgaactttccagaacctccccaagatcaggaatcctcaccaatagaaaatgacagctctccttaagtgatttcttctgttttctgtttccttttttaaacattagtgttcatagcttccaagagacatgctgactttcatttcttgaggtactctgcacatacgcaccacatctctatctggcc

SEQ ID NO: 131 - protein, 297 aa, Homo sapiens
MTTPRNSVNGTFPAEPMKGPIAMQSGPKPLFRRMSSLVGPTQSFFMRESKTLGAVQIMNGLFHIALGGLLMIPAGIYAPICVTVWYPLWGGIMYIISGSLLAATEKNSRKCLVKGKMIMNSLSLFAAISGMILSIMDILNIKISHFLKMESLNFIRAHTPYINIYNCEPANPSEKNSPSTQYCYSIQSLFLGILSVMLIFAFFQELVIAGIVENEWKRTCSRPKSNIVLLSAEEKKEQTIEIKEEVVGLTETSSQPKNEEDIEIIPIQEEEEEETETNFPEPPQDQESSPIENDSSP

SEQ ID NO: 132 - DNA, 3260 bp, Homo sapiens
ccatcccatagtgagggaagacacgcggaaacaggcttgcacccagacacgacaccatgcatctcctcggcccctggctcctgctcctggttctagaatacttggctttctctgactcaagtaaatgggtttttgagcaccctgaaaccctctacgcctgggagggggcctgcgtctggatcccctgcacctacagagccctagatggtgacctggaaagcttcatcctgttccacaatcctgagtataacaagaacacctcgaagtttgatgggacaagactctatgaaagcacaaaggatgggaaggttccttctgagcagaaaagggtgcaattcctgggagacaagaataagaactgcacactgagtatccacccggtgcacctcaatgacagtggtcagctggggctgaggatggagtccaagactgagaaatggatggaacgaatacacctcaatgtctctgaaaggccttttccacctcatatccagctccctccagaaattcaagagtcccaggaagtcactctgacctgcttgctgaatttctcctgctatgggtatccgatccaattgcagtggctcctagagggggttccaatgaggcaggctgctgtcacctcgacctccttgaccatcaagtctgtcttcacccggagcgagctcaagttctccccacagtggagtcaccatgggaagattgtgacctgccagcttcaggatgcagatgggaagttcctctccaatgacacggtgcagctgaacgtgaagcacaccccgaagttggagatcaaggtcactcccagtgatgccatagtgagggagggggactctgtgaccatgacctgcgaggtcagcagcagcaacccggagtacacgacggtatcctggctcaaggatgggacctcgctgaagaagcagaatacattcacgctaaacctgcgcgaagtgaccaaggaccagagtgggaagtactgctgtcaggtctccaatgacgtgggcccgggaaggtcggaagaagtgttcctgcaagtgcagtatgccccggaaccttccacggttcagatcctccactcaccggctgtggagggaagtcaagtcgagtttctttgcatgtcactggccaatcctcttccaacaaattacacgtggtaccacaatgggaaagaaatgcagggaaggacagaggagaaagtccacatcccaaagatcctcccctggcacgctgggacttattcctgtgtggcagaaaacattcttggtactggacagaggggcccgggagctgagctggatgtccagtatcctcccaagaaggtgaccacagtgattcaaaaccccatgccgattcgagaaggagacacagtgaccctttcctgtaactacaattccagtaaccccagtgttacccggtatgaatggaaaccccatggcgcctgggaggagccatcgcttggggtgctgaagatccaaaacgttggctgggacaacacaaccatcgcctgcgcacgttgtaatagttggtgctcgtgggcctcccctgtcgccctgaatgtccagtatgccccccgagacgtgagggtccggaaaatcaagcccctttccgagattcactctggaaactcggtcagcctccaatgtgacttctcaagcagccaccccaaagaagtccagttcttctgggagaaaaatggcaggcttctggggaaagaaagccagctgaattttgactccatctccccagaagatgctgggagttacagctgctgggtgaacaactccataggacagacagcgtccaaggcctggacacttgaagtgctgtatgcacccaggaggctgcgtgtgtccatgagcccgggggaccaagtgatggaggggaagagtgcaaccctgacctgtgagagtgacgccaaccctcccgtctcccactacacctggtttgactggaataaccaaagcctcccccaccacagccagaagctgagattggagccggtgaaggtccagcactcgggtgcctactggtgccaggggaccaacagtgtgggcaagggccgttcgcctctcagcacccttactgtctactatagcccggagaccatcggcaggcgagtggctgtgggactcgggtcctgcctcgccatcctcatcctggcaatctgtgggctcaagctccagcgacgttggaagaggacacagagccagcaggggcttcaggagaattccagcggccagagcttctttgtgaggaataaaaaggttagaagggcccccctctctgaaggcccccactccctgggatgctacaatccaatgatggaagatggcattagctacaccaccctgcgctttcccgagatgaacataccacgaactggagatgcagagtcctcagagatgcagagacctccccggacctgcgatgacacggtcacttattcagcattgcacaagcgccaagtgggcgactatgagaacgtcattccagattttccagaagatgaggggattcattactcagagctgatccagtttggggtcggggagcggcctcaggcacaagaaaatgtggactatgtgatcctcaaacattgacactggatgggctgcagcagaggcactgggggcagcgggggccagggaagtccccgagtttccccagacaccgccacatggcttcctcctgcgtgcatgtgcgcacacacacacacacacgcacacacacacacacacactcactgcggagaaccttgtgcctggctcagagccagtctttttggtgagggtaaccccaaacctccaaaactcctgcccctgttctcttccactctccttgctacccagaaatcatctaaatacctgccctgacatgcacacctcccctgccccaccagcccactggccatctccacccggagctgctgtgtcctctggatctgctcgtcattttccttcccttctccatctctctggccctctacccctgatctgacatccccactcacgaatattatgcccagtttctgcctctgagggaaagcccagaaaaggacagaaacgaagtagaaaggggcccagtcctggcctggcttctcctttggaagtgaggcattgcacggggagacgtacgtatcagcggccccttgactctggggactccgggtttgagatggacacactggtgtggattaacctgccagggagacagagctcacaataaaaatggctcagatgccacttcaaagaaaaaaaaaa

SEQ ID NO: 133 - protein, 847 aa, Homo sapiens
MHLLGPWLLLLVLEYLAFSDSSKWVFEHPETLYAWEGACVWIPCTYRALDGDLESFILFHNPEYNKNTSKFDGTRLYESTKDGKVPSEQKRVQFLGDKNKNCTLSIHPVHLNDSGQLGLRMESKTEKWMERIHLNVSERPFPPHIQLPPEIQESQEVTLTCLLNFSCYGYPIQLQWLLEGVPMRQAAVTSTSLTIKSVFTRSELKFSPQWSHHGKIVTCQLQDADGKFLSNDTVQLNVKHTPKLEIKVTPSDAIVREGDSVTMTCEVSSSNPEYTTVSWLKDGTSLKKQNTFTLNLREVTKDQSGKYCCQVSNDVGPGRSEEVFLQVQYAPEPSTVQILHSPAVEGSQVEFLCMSLANPLPTNYTWYHNGKEMQGRTEEKVHIPKILPWHAGTYSCVAENILGTGQRGPGAELDVQYPPKKVTTVIQNPMPIREGDTVTLSCNYNSSNPSVTRYEWKPHGAWEEPSLGVLKIQNVGWDNTTIACARCNSWCSWASPVALNVQYAPRDVRVRKIKPLSEIHSGNSVSLQCDFSSSHPKEVQFFWEKNGRLLGKESQLNFDSISPEDAGSYSCWVNNSIGQTASKAWTLEVLYAPRRLRVSMSPGDQVMEGKSATLTCESDANPPVSHYTWFDWNNQSLPHHSQKLRLEPVKVQHSGAYWCQGTNSVGKGRSPLSTLTVYYSPETIGRRVAVGLGSCLAILILAICGLKLQRRWKRTQSQQGLQENSSGQSFFVRNKKVRRAPLSEGPHSLGCYNPMMEDGISYTTLRFPEMNIPRTGDAESSEMQRPPRTCDDTVTYSALHKRQVGDYENVIPDFPEDEGIHYSELIQFGVGERPQAQENVDYVILKH

SEQ ID NO: 134 - DNA, 1906 bp, Homo sapiens
ccaagtcacatgattcaggattcagggggagaatccttcttggaacagagatgggcccagaactgaatcagatgaagagagataaggtgtgatgtggggaagactatataaagaatggacccagggctgcagcaagcactcaacggaatggcccctcctggagacacagccatgcatgtgccggcgggctccgtggccagccacctggggaccacgagccgcagctatttctatttgaccacagccactctggctctgtgccttgtcttcacggtggccactattatggtgttggtcgttcagaggacggactccattcccaactcacctgacaacgtccccctcaaaggaggaaattgctcagaagacctcttatgtatcctgaaaagagctccattcaagaagtcatgggcctacctccaagtggcaaagcatctaaacaaaaccaagttgtcttggaacaaagatggcattctccatggagtcagatatcaggatgggaatctggtgatccaattccctggtttgtacttcatcatttgccaactgcagtttcttgtacaatgcccaaataattctgtcgatctgaagttggagcttctcatcaacaagcatatcaaaaaacaggccctggtgacagtgtgtgagtctggaatgcaaacgaaacacgtataccagaatctctctcaattcttgctggattacctgcaggtcaacaccaccatatcagtcaatgtggatacattccagtacatagatacaagcacctttcctcttgagaatgtgttgtccatcttcttatacagtaattcagactgaacagtttctcttggccttcaggaagaaagcgcctctctaccatacagtatttcatccctccaaacacttgggcaaaaagaaaactttagaccaagacaaactacacagggtattaaatagtatacttctccttctgtctcttggaaagatacagctccagggttaaaaagagagtttttagtgaagtatctttcagatagcaggcagggaagcaatgtagtgtggtgggcagagccccacacagaatcagaagggatgaatggatgtcccagcccaaccactaattcactgtatggtcttgatctatttcttctgttttgagagcctccagttaaaatggggcttcagtaccagagcagctagcaactctgccctaatgggaaatgaaggggagctgggtgtgagtgtttacactgtgcccttcacgggatacttcttttatctgcagatggcctaatgcttagttgtccaagtcgcgatcaaggactctctcacacaggaaacttccctatactggcagatacacttgtgactgaaccatgcccagtttatgcctgtctgactgtcactctggcactaggaggctgatcttgtactccatatgaccccacccctaggaacccccagggaaaaccaggctcggacagccccctgttcctgagatggaaagcacaaatttaatacaccaccacaatggaaaacaagttcaaagacttttacttacagatcctggacagaaagggcataatgagtctgaagggcagtcctccttctccaggttacatgaggcaggaataagaagtcagacagagacagcaagacagttaacaacgtaggtaaagaaatagggtgtggtcactctcaattcactggcaaatgcctgaatggtctgtctgaaggaagcaacagagaagtggggaatccagtctgctaggcaggaaagatgcctctaagttcttgtctctggccagaggtgtggtatagaaccagaaacccatatcaagggtgactaagcccggcttccggtatgagaaattaaacttgtatacaaaatggttgccaaggcaacataaaattataagaattc

SEQ ID NO: 135 - protein, 234 aa, Homo sapiens
MDPGLQQALNGMAPPGDTAMHVPAGSVASHLGTTSRSYFYLTTATLALCLVFTVATIMVLVVQRTDSIPNSPDNVPLKGGNCSEDLLCILKRAPFKKSWAYLQVAKHLNKTKLSWNKDGILHGVRYQDGNLVIQFPGLYFIICQLQFLVQCPNNSVDLKLELLINKHIKKQALVTVCESGMQTKHVYQNLSQFLLDYLQVNTTISVNVDTFQYIDTSTFPLENVLSIFLYSNSD

SEQ ID NO: 136 - DNA, 1125 bp, Homo sapiens
gtctcccccactgtcagcacctcttctgtgtggtgagtggaccgcttaccccactaggtgaagatgtcagcccaggagagctgcctcagcctcatcaagtacttcctcttcgttttcaacctcttcttcttcgtcctcggcagcctgatcttctgcttcggcatctggatcctcatcgacaagaccagcttcgtgtcctttgtgggcttggccttcgtgcctctgcagatctggtccaaagtcctggccatctcaggaatcttcaccatgggcatcgccctcctgggttgtgtgggggccctcaaggagctccgctgcctcctgggcctgtattttgggatgctgctgctcctgtttgccacacagatcaccctgggaatcctcatctccactcagcgggcccagctggagcgaagcttgcgggacgtcgtagagaaaaccatccaaaagtacggcaccaaccccgaggagaccgcggccgaggagagctgggactatgtgcagttccagctgcgctgctgcggctggcactacccgcaggactggttccaagtcctcatcctgagaggtaacgggtcggaggcgcaccgcgtgccctgctcctgctacaacttgtcggcgaccaacgactccacaatcctagataaggtgatcttgccccagctcagcaggcttggacacctggcgcggtccagacacagtgcagacatctgcgctgtccctgcagagagccacatctaccgcgagggctgcgcgcagggcctccagaagtggctgcacaacaaccttatttccatagtgggcatttgcctgggcgtcggcctactcgagctcgggttcatgacgctctcgatattcctgtgcagaaacctggaccacgtctacaaccggctcgctcgataccgttaggccccgccctccccaaagtcccgccccgcccccgtcacgtgcgctgggcacttccctgctgcctgtaaatatttgtttaatccccagttcgcctggagccctccgccttcacattcccctggggacccacgtggctgcgtgcccctgctgctgtcacctctcccacgggacctggggctttcgtccacagcttcctgtccccatctgtcggcctac

SEQ ID NO: 137 - protein, 281 aa, Homo sapiens
MSAQESCLSLIKYFLFVFNLFFFVLGSLIFCFGIWILIDKTSFVSFVGLAFVPLQIWSKVLAISGIFTMGIALLGCVGALKELRCLLGLYFGMLLLLFATQITLGILISTQRAQLERSLRDVVEKTIQKYGTNPEETAAEESWDYVQFQLRCCGWHYPQDWFQVLILRGNGSEAHRVPCSCYNLSATNDSTILDKVILPQLSRLGHLARSRHSADICAVPAESHIYREGCAQGLQKWLHNNLISIVGICLGVGLLELGFMTLSIFLCRNLDHVYNRLARYR

SEQ ID NO: 138 - DNA, 2220 bp, Homo sapiens
atgcctgggaagatggtcgtgatccttggagcctcaaatatactttggataatgtttgcagcttctcaagcttttaaaatcgagaccaccccagaatctagatatcttgctcagattggtgactccgtctcattgacttgcagcaccacaggctgtgagtccccatttttctcttggagaacccagatagatagtccactgaatgggaaggtgacgaatgaggggaccacatctacgctgacaatgaatcctgttagttttgggaacgaacactcttacctgtgcacagcaacttgtgaatctaggaaattggaaaaaggaatccaggtggagatctactcttttcctaaggatccagagattcatttgagtggccctctggaggctgggaagccgatcacagtcaagtgttcagttgctgatgtatacccatttgacaggctggagatagacttactgaaaggagatcatctcatgaagagtcaggaatttctggaggatgcagacaggaagtccctggaaaccaagagtttggaagtaacctttactcctgtcattgaggatattggaaaagttcttgtttgccgagctaaattacacattgatgaaatggattctgtgcccacagtaaggcaggctgtaaaagaattgcaagtctacatatcacccaagaatacagttatttctgtgaatccatccacaaagctgcaagaaggtggctctgtgaccatgacctgttccagcgagggtctaccagctccagagattttctggagtaagaaattagataatgggaatctacagcacctttctggaaatgcaactctcaccttaattgctatgaggatggaagattctggaatttatgtgtgtgaaggagttaatttgattgggaaaaacagaaaagaggtggaattaattgttcaagagaaaccatttactgttgagatctcccctggaccccggattgctgctcagattggagactcagtcatgttgacatgtagtgtcatgggctgtgaatccccatctttctcctggagaacccagatagacagccctctgagcgggaaggtgaggagtgaggggaccaattccacgctgaccctgagccctgtgagttttgagaacgaacactcttatctgtgcacagtgacttgtggacataagaaactggaaaagggaatccaggtggagctctactcattccctagagatccagaaatcgagatgagtggtggcctcgtgaatgggagctctgtcactgtaagctgcaaggttcctagcgtgtacccccttgaccggctggagattgaattacttaagggggagactattctggagaatatagagtttttggaggatacggatatgaaatctctagagaacaaaagtttggaaatgaccttcatccctaccattgaagatactggaaaagctcttgtttgtcaggctaagttacatattgatgacatggaattcgaacccaaacaaaggcagagtacgcaaacactttatgtcaatgttgcccccagagatacaaccgtcttggtcagcccttcctccatcctggaggaaggcagttctgtgaatatgacatgcttgagccagggctttcctgctccgaaaatcctgtggagcaggcagctccctaacggggagctacagcctctttctgagaatgcaactctcaccttaatttctacaaaaatggaagattctggggtttatttatgtgaaggaattaaccaggctggaagaagcagaaaggaagtggaattaattatccaagttactccaaaagacataaaacttacagcttttccttctgagagtgtcaaagaaggagacactgtcatcatctcttgtacatgtggaaatgttccagaaacatggataatcctgaagaaaaaagcggagacaggagacacagtactaaaatctatagatggcgcctataccatccgaaaggcccagttgaaggatgcgggagtatatgaatgtgaatctaaaaacaaagttggctcacaattaagaagtttaacacttgatgttcaaggaagagaaaacaacaaagactatttttctcctgagcttctcgtgctctattttgcatcctccttaataatacctgccattggaatgataatttactttgcaagaaaagccaacatgaaggggtcatatagtcttgtagaagcacagaaatcaaaagtgtag

SEQ ID NO: 139 - protein, 739 aa, Homo sapiens
MPGKMVVILGASNILWIMFAASQAFKIETTPESRYLAQIGDSVSLTCSTTGCESPFFSWRTQIDSPLNGKVTNEGTTSTLTMNPVSFGNEHSYLCTATCESRKLEKGIQVEIYSFPKDPEIHLSGPLEAGKPITVKCSVADVYPFDRLEIDLLKGDHLMKSQEFLEDADRKSLETKSLEVTFTPVIEDIGKVLVCRAKLHIDEMDSVPTVRQAVKELQVYISPKNTVISVNPSTKLQEGGSVTMTCSSEGLPAPEIFWSKKLDNGNLQHLSGNATLTLIAMRMEDSGIYVCEGVNLIGKNRKEVELIVQEKPFTVEISPGPRIAAQIGDSVMLTCSVMGCESPSFSWRTQIDSPLSGKVRSEGTNSTLTLSPVSFENEHSYLCTVTCGHKKLEKGIQVELYSFPRDPEIEMSGGLVNGSSVTVSCKVPSVYPLDRLEIELLKGETILENIEFLEDTDMKSLENKSLEMTFIPTIEDTGKALVCQAKLHIDDMEFEPKQRQSTQTLYVNVAPRDTTVLVSPSSILEEGSSVNMTCLSQGFPAPKILWSRQLPNGELQPLSENATLTLISTKMEDSGVYLCEGINQAGRSRKEVELIIQVTPKDIKLTAFPSESVKEGDTVIISCTCGNVPETWIILKKKAETGDTVLKSIDGAYTIRKAQLKDAGVYECESKNKVGSQLRSLTLDVQGRENNKDYFSPELLVLYFASSLIIPAIGMIIYFARKANMKGSYSLVEAQKSKV

SEQ ID NO: 140 - DNA, 2986 bp, Homo sapiens
gcgccccagtcgacgctgagctcctctgctactcagagttgcaacctcagcctcgctatggctcccagcagcccccggcccgcgctgcccgcactcctggtcctgctcggggctctgttcccaggacctggcaatgcccagacatctgtgtccccctcaaaagtcatcctgccccggggaggctccgtgctggtgacatgcagcacctcctgtgaccagcccaagttgttgggcatagagaccccgttgcctaaaaaggagttgctcctgcctgggaacaaccggaaggtgtatgaactgagcaatgtgcaagaagatagccaaccaatgtgctattcaaactgccctgatgggcagtcaacagctaaaaccttcctcaccgtgtactggactccagaacgggtggaactggcacccctcccctcttggcagccagtgggcaagaaccttaccctacgctgccaggtggagggtggggcaccccgggccaacctcaccgtggtgctgctccgtggggagaaggagctgaaacgggagccagctgtgggggagcccgctgaggtcacgaccacggtgctggtgaggagagatcaccatggagccaatttctcgtgccgcactgaactggacctgcggccccaagggctggagctgtttgagaacacctcggccccctaccagctccagacctttgtcctgccagcgactcccccacaacttgtcagcccccgggtcctagaggtggacacgcaggggaccgtggtctgttccctggacgggctgttcccagtctcggaggcccaggtccacctggcactgggggaccagaggttgaaccccacagtcacctatggcaacgactccttctcggccaaggcctcagtcagtgtgaccgcagaggacgagggcacccagcggctgacgtgtgcagtaatactggggaaccagagccaggagacactgcagacagtgaccatctacagctttccggcgcccaacgtgattctgacgaagccagaggtctcagaagggaccgaggtgacagtgaagtgtgaggcccaccctagagccaaggtgacgctgaatggggttccagcccagccactgggcccgagggcccagctcctgctgaaggccaccccagaggacaacgggcgcagcttctcctgctctgcaaccctggaggtggccggccagcttatacacaagaaccagacccgggagcttcgtgtcctgtatggcccccgactggacgagagggattgtccgggaaactggacgtggccagaaaattcccagcagactccaatgtgccaggcttgggggaacccattgcccgagctcaagtgtctaaaggatggcactttcccactgcccatcggggaatcagtgactgtcactcgagatcttgagggcacctacctctgtcgggccaggagcactcaaggggaggtcacccgcgaggtgaccgtgaatgtgctctccccccggtatgagattgtcatcatcactgtggtagcagccgcagtcataatgggcactgcaggcctcagcacgtacctctataaccgccagcggaagatcaagaaatacagactacaacaggcccaaaaagggacccccatgaaaccgaacacacaagccacgcctccctgaacctatcccgggacagggcctcttcctcggccttcccatattggtggcagtggtgccacactgaacagagtggaagacatatgccatgcagctacacctaccggccctgggacgccggaggacagggcattgtcctcagtcagatacaacagcatttggggccatggtacctgcacacctaaaacactaggccacgcatctgatctgtagtcacatgactaagccaagaggaaggagcaagactcaagacatgattgatggatgttaaagtctagcctgatgagaggggaagtggtgggggagacatagccccaccatgaggacatacaactgggaaatactgaaacttgctgcctattgggtatgctgaggcccacagacttacagaagaagtggccctccatagacatgtgtagcatcaaaacacaaaggcccacacttcctgacggatgccagcttgggcactgctgtctactgaccccaacccttgatgatatgtatttattcatttgttattttaccagctatttattgagtgtcttttatgtaggctaaatgaacataggtctctggcctcacggagctcccagtccatgtcacattcaaggtcaccaggtacagttgtacaggttgtacactgcaggagagtgcctggcaaaaagatcaaatggggctgggacttctcattggccaacctgcctttccccagaaggagtgatttttctatcggcacaaaagcactatatggactggtaatggttcacaggttcagagattacccagtgaggccttattcctcccttccccccaaaactgacacctttgttagccacctccccacccacatacatttctgccagtgttcacaatgacactcagcggtcatgtctggacatgagtgcccagggaatatgcccaagctatgccttgtcctcttgtcctgtttgcatttcactgggagcttgcactattgcagctccagtttcctgcagtgatcagggtcctgcaagcagtggggaagggggccaaggtattggaggactccctcccagctttggaagggtcatccgcgtgtgtgtgtgtgtgtatgtgtagacaagctctcgctctgtcacccaggctggagtgcagtggtgcaatcatggttcactgcagtcttgaccttttgggctcaagtgatcctcccacctcagcctcctgagtagctgggaccataggctcacaacaccacacctggcaaatttgattttttttttttttttcagagacggggtctcgcaacattgcccagacttcctttgtgttagttaataaagctttctcaactgcc

SEQ ID NO: 141 - protein, 532 aa, Homo sapiens
MAPSSPRPALPALLVLLGALFPGPGNAQTSVSPSKVILPRGGSVLVTCSTSCDQPKLLGIETPLPKKELLLPGNNRKVYELSNVQEDSQPMCYSNCPDGQSTAKTFLTVYWTPERVELAPLPSWQPVGKNLTLRCQVEGGAPRANLTVVLLRGEKELKREPAVGEPAEVTTTVLVRRDHHGANFSCRTELDLRPQGLELFENTSAPYQLQTFVLPATPPQLVSPRVLEVDTQGTVVCSLDGLFPVSEAQVHLALGDQRLNPTVTYGNDSFSAKASVSVTAEDEGTQRLTCAVILGNQSQETLQTVTIYSFPAPNVILTKPEVSEGTEVTVKCEAHPRAKVTLNGVPAQPLGPRAQLLLKATPEDNGRSFSCSATLEVAGQLIHKNQTRELRVLYGPRLDERDCPGNWTWPENSQQTPMCQAWGNPLPELKCLKDGTFPLPIGESVTVTRDLEGTYLCRARSTQGEVTREVTVNVLSPRYEIVIITVVAAAVIMGTAGLSTYLYNRQRKIKKYRLQQAQKGTPMKPNTQATPP

SEQ ID NO: 142 - DNA, 591 bp, Mus musculus
atgtcgcaaggcctccagctcctgtttctaggctgcgcctgcagcctggcacccgcgatggcgatgcgggaggtgacggtggcttgctccgagaccgccgacttgccttgcacagcgccctgggacccgcagctctcctatgcagtgtcctgggccaaggtctccgagagtggcactgagagtgtggagctcccggagagcaagcaaaacagctccttcgaggcccccaggagaagggcctattccctgacgatccaaaacactaccatctgcagctcgggcacctacaggtgtgccctgcaggagctcggagggcagcgcaacttgagcggcaccgtggttctgaaggtgacaggatgccccaaggaagctacagagtcaactttcaggaagtacagggcagaagctgtgttgctcttctctctggttgttttctacctgacactcatcattttcacctgcaaatttgcacgactacaaagcattttcccagatatttctaaacctggtacggaacaagcttttcttccagtcacctccccaagcaaacatttggggccagtgacccttcctaagacagaaacggtatga

SEQ ID NO: 143 - protein, 196 aa, Mus musculus
MSQGLQLLFLGCACSLAPAMAMREVTVACSETADLPCTAPWDPQLSYAVSWAKVSESGTESVELPESKQNSSFEAPRRRAYSLTIQNTTICSSGTYRCALQELGGQRNLSGTVVLKVTGCPKEATESTFRKYRAEAVLLFSLVVFYLTLIIFTCKFARLQSIFPDISKPGTEQAFLPVTSPSKHLGPVTLPKTETV

SEQ ID NO: 144 - DNA, 6928 bp, Homo sapiens
ggcgggagcgcgtgcgcccgaggacccggccggaaggcttgcgccagctcaggatgaggacaggctgggcgacccctcgccgcccggcggggctcctcatgctgctcttctggttcttcgatctcgcggagccctctggccgcgcagctaatgaccccttcaccatcgtccatggaaatacgggcaagtgcatcaagccagtgtatggctggatagtagcagacgactgtgatgaaactgaggacaagttatggaagtgggtgtcccagcatcggctctttcatttgcactcccaaaagtgccttggcctcgatattaccaaatcggtaaatgagctgagaatgttcagctgtgactccagtgccatgctgtggtggaaatgtgagcaccactctctgtacggagctgcccggtaccggctggctctgaaggatggacatggcacagcaatctcaaatgcatctgatgtctggaagaaaggaggctcagaggaaagcctttgtgaccagccttatcatgagatctataccagagatgggaactcttatgggagaccttgtgaatttccattcttaattgatgggacctggcatcatgattgcattcttgatgaagatcatagtgggccatggtgtgccaccaccttaaattatgaatatgaccgaaagtggggcatctgcttaaagcctgaaaacggttgtgaagataattgggaaaagaacgagcagtttggaagttgctaccaatttaatactcagacggctctttcttggaaagaagcttatgtttcatgtcagaatcaaggagctgatttactgagcatcaacagtgctgctgaattaacttaccttaaagaaaaagaaggcattgctaagattttctggattggtttaaatcagctatactctgctagaggctgggaatggtcagaccacaaaccattaaactttctcaactgggatccagacaggcccagtgcacctactataggtggctccagctgtgcaagaatggatgctgagtctggtctgtggcagagcttttcctgtgaagctcaactgccctatgtctgcaggaaaccattaaataatacagtggagttaacagatgtctggacatactcagatacccgctgtgatgcaggctggctgccaaataatggattttgctatctgctggtaaatgaaagtaattcctgggataaggcacatgcgaaatgcaaagccttcagtagtgacctaatcagcattcattctctagcagatgtggaggtggttgtcacaaaactccataatgaggatatcaaagaagaagtgtggataggccttaagaacataaacataccaactttatttcagtggtcagatggtactgaagttactctaacatattgggatgagaatgagccaaatgttccctacaataagacgcccaactgtgtttcctacttaggagagctaggtcagtggaaagtccaatcatgtgaggagaaactaaaatatgtatgcaagagaaagggagaaaaactgaatgacgcaagttctgataagatgtgtcctccagatgagggctggaagagacatggagaaacctgttacaagatttatgaggatgaggtcccttttggaacaaactgcaatctgactatcactagcagatttgagcaagaatacctaaatgatttgatgaaaaagtatgataaatctctaagaaaatacttctggactggcctgagagatgtagattcttgtggagagtataactgggcaactgttggtggaagaaggcgggctgtaaccttttccaactggaattttcttgagccagcttccccgggcggctgcgtggctatgtctactggaaagtctgttggaaagtgggaggtgaaggactgcagaagcttcaaagcactttcaatttgcaagaaaatgagtggaccccttgggcctgaagaagcatcccctaagcctgatgacccctgtcctgaaggctggcagagtttccccgcaagtctttcttgttataaggtattccatgcagaaagaattgtaagaaagaggaactgggaagaagctgaacgattctgccaagcccttggagcacacctttctagcttcagccatgtggatgaaataaaggaatttcttcactttttaacggaccagttcagtggccagcattggctgtggattggtttgaataaaaggagcccagatttacaaggatcctggcaatggagtgatcgtacaccagtgtctactattatcatgccaaatgagtttcagcaggattatgacatcagagactgtgctgctgtcaaggtatttcataggccatggcgaagaggctggcatttctatgatgatagagaatttatttatttgaggccttttgcttgtgatacaaaacttgaatgggtgtgccaaattccaaaaggccgtactccaaaaacaccagactggtacaatccagaccgtgctggaattcatggacctccacttataattgaaggaagtgaatattggtttgttgctgatcttcacctaaactatgaagaagccgtcctgtactgtgccagcaatcacagctttcttgcgactataacatcttttgtgggactaaaagccatcaaaaacaaaatagcaaatatatctggtgatggacagaagtggtggataagaattagcgagtggccaatagatgatcattttacatactcacgatatccatggcaccgctttcctgtgacatttggagaggaatgcttgtacatgtctgccaagacttggcttatcgacttaggtaaaccaacagactgtagtaccaagttgcccttcatctgtgaaaaatataatgtttcttcgttagagaaatacagcccagattctgcagctaaagtgcaatgttctgagcaatggattccttttcagaataagtgttttctaaagatcaaacccgtgtctctcacattttctcaagcaagcgatacctgtcactcctatggtggcacccttccttcagtgttgagccagattgaacaagactttattacatccttgcttccggatatggaagctactttatggattggtttgcgctggactgcctatgaaaagataaacaaatggacagataacagagagctgacgtacagtaactttcacccattattggttagtgggaggctgagaataccagaaaatttttttgaggaagagtctcgctaccactgtgccctaatactcaacctccaaaaatcaccgtttactgggacgtggaattttacatcctgcagtgaacgccactttgtgtctctctgtcagaaatattcagaagttaaaagcagacagacgttgcagaatgcttcagaaactgtaaagtatctaaataatctgtacaaaataatcccaaagactctgacttggcacagtgctaaaagggagtgtctgaaaagtaacatgcagctggtgagcatcacggacccttaccagcaggcattcctcagtgtgcaggcgctccttcacaactcttccttatggatcggactcttcagtcaagatgatgaactcaactttggttggtcagatgggaaacgtcttcattttagtcgctgggctgaaactaatgggcaactcgaagactgtgtagtattagacactgatggattctggaaaacagttgattgcaatgacaatcaaccaggtgctatttgctactattcaggaaatgagactgaaaaagaggtcaaaccagttgacagtgttaaatgtccatctcctgttctaaatactccgtggataccatttcagaactgttgctacaatttcataataacaaagaataggcatatggcaacaacacaggatgaagttcatactaaatgccagaaactgaatccaaaatcacatattctgagtattcgagatgaaaaggagaataactttgttcttgagcaactgctgtacttcaattatatggcttcatgggtcatgttaggaataacttatagaaataattctcttatgtggtttgataagaccccactgtcatatacacattggagagcaggaagaccaactataaaaaatgagaagtttttggctggtttaagtactgacggcttctgggatattcaaacctttaaagttattgaagaagcagtttattttcaccagcacagcattcttgcttgtaaaattgaaatggttgactacaaagaagaacataatactacactgccacagtttatgccatatgaagatggtatttacagtgttattcaaaaaaaggtaacatggtatgaagcattaaacatgtgttctcaaagtggaggtcacttggcaagcgttcacaaccaaaatggccagctctttctggaagatattgtaaaacgtgatggatttccactatgggttgggctctcaagtcatgatggaagtgaatcaagttttgaatggtctgatggtagtacatttgactatatcccatggaaaggccaaacatctcctggaaattgtgttctcttggatccaaaaggaacttggaaacatgaaaaatgcaactctgttaaggatggtgctatttgttataaacctacaaaatctaaaaagctgtcccgtcttacatattcatcaagatgtccagcagcaaaagagaatgggtcacggtggatccagtacaagggtcactgttacaagtctgatcaggcattgcacagtttttcagaggccaaaaaattgtgttcaaaacatgatcactctgcaactatcgtttccataaaagatgaagatgagaataaatttgtgagcagactgatgagggaaaataataacattaccatgagagtttggcttggattatctcaacattctgttgaccagtcttggagttggttagatggatcagaagtgacatttgtcaaatgggaaaataaaagtaagagtggtgttggaagatgtagcatgttgatagcttcaaatgaaacttggaaaaaagttgaatgtgaacatggttttggaagagttgtctgcaaagtgcctctgggccctgattacacagcaatagctatcatagttgccacactaagtatcttagttctcatgggcggactgatttggttcctcttccaaaggcaccgtttgcacctggcgggtttctcatcagttcgatatgcacaaggagtgaatgaagatgagattatgcttccttctttccatgactaaattcttctaaaagttttctaatttgcactaatgtggttatggagaaattagtcacttaaaatgtcccagtgtcagtatttactctgctccaaagtagaactcttaaatactttttcagttgtttagatcttaggcatgtgctggtatccacagttaattccctgctaaatgccatgtttatcaccctaattaatagaatggaggggactccaaagctggaactgaagtccaaattgtttgtacagtaatatgtttaatgttcattttctctgtatgaatgtgattggtaactaggatatgtatattttaatagaatttttaacaaaacttcttagaaaattaaaataggcatattactaggtgacatgtctactttttaatttttaagagcatccggccaaatgcaaaattagtacctcaaagtaaaaattgaactgtaaactctatcagcattgtttcaaaatagtcatttttagcactggggaaaaataaacaataagacatgcttactttttaatttttatttttttgagactgagtctctctctgttgcccaggctggagtacaatggcgtgatctcggctcactgcaaatctccgcctcccaggttcaagcgattctcctgcctcagcctcctgagtagctgggattacaggcaactgccaccatgcccggctaatttttgtatttttagtagagatggggtttcaccatgttggccaggctggtctcgaactcgtgaccgcagtgatcctcccgcctcggcctcccaaagtgctgggattacaggcatgagccaccgcgcctggcctctgcttactttttatatagcaaaatgattccccttggcaagatgtttcttatattattccaaagttatttcataccattattatgtaaatatgaagagtttttttctgtttataattgtttataaaacaatgacttttaaagatttagtgcttaacattttcccaagtgtgggaacattatttttagattgagtaggtaccttgtagcagtgtgctttgcattttctgatgtattacatgactgtttcttttgtaaagagaatcaactaggtatttaagactgataattttacaatttatatgcttcacatagcatgtcaacttttgactaagaattttgttttacttttttaacatgtgttaaacagagaaagggtccatgaaggaaagtgtatgagttgcatttgtaaaaatgagactttttcagtggaactctaaaccttgtgatgactactaacaaatgtaaaattatgagtgattaagaaaacattgctttgtggttatcactttaagttttgacacctagattatagtcttagtaatagcatccactggaaaaggtgaaaatgttttattcagcatttaacttacatttgtactttagagtatttttgtataaaatccatagatttattttacatttagagtatttacactatgataaagttgtaaataattttctaagacagtttttatatagtctacagttgtcctgatttcttattgaatttgttagactagttctcttgtcttgtgatctgtgtacaattttagtcactaagactttcctccaagaactaagccaacttgatgtgaaaagcacggctgtatataatggtgatgtcataataaagttgttttatcttttaagtaaaaaaaaaaaaaaaaaaaaa

SEQ ID NO: 145 - protein, 1722 aa, Homo sapiens
MRTGWATPRRPAGLLMLLFWFFDLAEPSGRAANDPFTIVHGNTGKCIKPVYGWIVADDCDETEDKLWKWVSQHRLFHLHSQKCLGLDITKSVNELRMFSCDSSAMLWWKCEHHSLYGAARYRLALKDGHGTAISNASDVWKKGGSEESLCDQPYHEIYTRDGNSYGRPCEFPFLIDGTWHHDCILDEDHSGPWCATTLNYEYDRKWGICLKPENGCEDNWEKNEQFGSCYQFNTQTALSWKEAYVSCQNQGADLLSINSAAELTYLKEKEGIAKIFWIGLNQLYSARGWEWSDHKPLNFLNWDPDRPSAPTIGGSSCARMDAESGLWQSFSCEAQLPYVCRKPLNNTVELTDVWTYSDTRCDAGWLPNNGFCYLLVNESNSWDKAHAKCKAFSSDLISIHSLADVEVVVTKLHNEDIKEEVWIGLKNINIPTLFQWSDGTEVTLTYWDENEPNVPYNKTPNCVSYLGELGQWKVQSCEEKLKYVCKRKGEKLNDASSDKMCPPDEGWKRHGETCYKIYEDEVPFGTNCNLTITSRFEQEYLNDLMKKYDKSLRKYFWTGLRDVDSCGEYNWATVGGRRRAVTFSNWNFLEPASPGGCVAMSTGKSVGKWEVKDCRSFKALSICKKMSGPLGPEEASPKPDDPCPEGWQSFPASLSCYKVFHAERIVRKRNWEEAERFCQALGAHLSSFSHVDEIKEFLHFLTDQFSGQHWLWIGLNKRSPDLQGSWQWSDRTPVSTIIMPNEFQQDYDIRDCAAVKVFHRPWRRGWHFYDDREFIYLRPFACDTKLEWVCQIPKGRTPKTPDWYNPDRAGIHGPPLIIEGSEYWFVADLHLNYEEAVLYCASNHSFLATITSFVGLKAIKNKIANISGDGQKWWIRISEWPIDDHFTYSRYPWHRFPVTFGEECLYMSAKTWLIDLGKPTDCSTKLPFICEKYNVSSLEKYSPDSAAKVQCSEQWIPFQNKCFLKIKPVSLTFSQASDTCHSYGGTLPSVLSQIEQDFITSLLPDMEATLWIGLRWTAYEKINKWTDNRELTYSNFHPLLVSGRLRIPENFFEEESRYHCALILNLQKSPFTGTWNFTSCSERHFVSLCQKYSEVKSRQTLQNASETVKYLNNLYKIIPKTLTWHSAKRECLKSNMQLVSITDPYQQAFLSVQALLHNSSLWIGLFSQDDELNFGWSDGKRLHFSRWAETNGQLEDCVVLDTDGFWKTVDCNDNQPGAICYYSGNETEKEVKPVDSVKCPSPVLNTPWIPFQNCCYNFIITKNRHMATTQDEVHTKCQKLNPKSHILSIRDEKENNFVLEQLLYFNYMASWVMLGITYRNNSLMWFDKTPLSYTHWRAGRPTIKNEKFLAGLSTDGFWDIQTFKVIEEAVYFHQHSILACKIEMVDYKEEHNTTLPQFMPYEDGIYSVIQKKVTWYEALNMCSQSGGHLASVHNQNGQLFLEDIVKRDGFPLWVGLSSHDGSESSFEWSDGSTFDYIPWKGQTSPGNCVLLDPKGTWKHEKCNSVKDGAICYKPTKSKKLSRLTYSSRCPAAKENGSRWIQYKGHCYKSDQALHSFSEAKKLCSKHDHSATIVSIKDEDENKFVSRLMRENNNITMRVWLGLSQHSVDQSWSWLDGSEVTFVKWENKSKSGVGRCSMLIASNETWKKVECEHGFGRVVCKVPLGPDYTAIAIIVATLSILVLMGGLIWFLFQRHRLHLAGFSSVRYAQGVNEDEIMLPSFHD

SEQ ID NO: 146 - protein, 15 aa, Artificial Sequence
  Exemplary linker.
GGGGSGGGGSGGGGS

SEQ ID NO: 147 - DNA, 1518 bp, Artificial Sequence
  Mouse-Human hybrid fusion protein
aagcttgccgccatggattttcaagtgcagattttcagcttcctgctaatcagtgcttcagtcataattgccagaggacaaattgttctctcccagtctccagcaatcctgtctgcatctccaggggagaaggtcacaatgacttgcagggccagctcaagtgtaagttacatgcactggtaccagcagaagccaggatcctcccccaaaccctggatttatgccccatccaacctggcttctggagtccctgctcgcttcagtggcagtgggtctgggacctcttactctctcacaatcagcagagtggaggctgaagatgctgccacttattactgccagcagtggagttttaacccacccacgttcggtgctgggaccaagctggagctgaaaggtggcggtggctcgggcggtggtggatctggaggaggtgggagctctcaggcttatctacagcagtctggggctgagctggtgaggcctggggcctcagtgaagatgtcctgcaaggcttctggctacacatttaccagttacaatatgcactgggtaaagcagacacctagacagggcctggaatggattggagctatttatccaggaaatggtgatacttcctacaatcagaagttcaagggcaaggccacactgactgtagacaaatcctccagcacagcctacatgcagctcagcagcctgacatctgaagactctgcggtctatttctgtgcaagagtggtgtactatagtaactcttactggtacttcgatgtctggggcacagggaccacggtcaccgtctctgatcaggagcccaaatcttgtgacaaaactcacacatgcccaccgtgcccagcacctgaactcctggggggaccgtcagtcttcctcttccccccaaaacccaaggacaccctcatgatctcccggacccctgaggtcacatgcgtggtggtggacgtgagccacgaagaccctgaggtcaagttcaactggtacgtggacggcgtggaggtgcataatgccaagacaaagccgcgggaggagcagtacaacagcacgtaccgtgtggtcagcgtcctcaccgtcctgcaccaggactggctgaatggcaaggagtacaagtgcaaggtctccaacaaagccctcccagcccccatcgagaaaacaatctccaaagccaaagggcagccccgagaaccacaggtgtacaccctgcccccatcccgggatgagctgaccaagaaccaggtcagcctgacctgcctggtcaaaggcttctatcccagcgacatcgccgtggagtgggagagcaatgggcagccggagaacaactacaagaccacgcctcccgtgctggactccgacggctccttcttcctctacagcaagctcaccgtggacaagagcaggtggcagcaggggaacgtcttctcatgctccgtgatgcatgaggctctgcacaaccactacacgcagaagagcctctccctgtctccgggtaaatgatctaga

SEQ ID NO: 148 - protein, 499 aa, Artificial Sequence
  Mouse-Human hybrid fusion protein
MDFQVQIFSFLLISASVIIARGQIVLSQSPAILSASPGEKVTMTCRASSSVSYMHWYQQKPGSSPKPWIYAPSNLASGVPARFSGSGSGTSYSLTISRVEAEDAATYYCQQWSFNPPTFGAGTKLELKGGGGSGGGGSGGGGSSQAYLQQSGAELVRPGASVKMSCKASGYTFTSYNMHWVKQTPRQGLEWIGAIYPGNGDTSYNQKFKGKATLTVDKSSSTAYMQLSSLTSEDSAVYFCARVVYYSNSYWYFDVWGTGTTVTVSDQEPKSCDKTHTCPPCPAPELLGGPSVFLFPPKPKDTLMISRTPEVTCVVVDVSHEDPEVKFNWYVDGVEVHNAKTKPREEQYNSTYRVVSVLTVLHQDWLNGKEYKCKVSNKALPAPIEKTISKAKGQPREPQVYTLPPSRDELTKNQVSLTCLVKGFYPSDIAVEWESNGQPENNYKTTPPVLDSDGSFFLYSKLTVDKSRWQQGNVFSCSVMHEALHNHYTQKSLSLSPGK

SEQ ID NO: 149 - DNA, 1470 bp, Artificial Sequence
  Mouse-Human hybrid fusion protein
aagcttgccgccatggattttcaagtgcagattttcagcttcctgctaatcagtgcttcagtcataattgccagaggacaaattgttctctcccagtctccagcaatcctgtctgcatctccaggggagaaggtcacaatgacttgcagggccagctcaagtgtaagttacatgcactggtaccagcagaagccaggatcctcccccaaaccctggatttatgccccatccaacctggcttctggagtccctgctcgcttcagtggcagtgggtctgggacctcttactctctcacaatcagcagagtggaggctgaagatgctgccacttattactgccagcagtggagttttaacccacccacgttcggtgctgggaccaagctggagctgaaaggtggcggtggctcgggcggtggtggatctggaggaggtgggagctctcaggcttatctacagcagtctggggctgagctggtgaggcctggggcctcagtgaagatgtcctgcaaggcttctggctacacatttaccagttacaatatgcactgggtaaagcagacacctagacagggcctggaatggattggagctatttatccaggaaatggtgatacttcctacaatcagaagttcaagggcaaggccacactgactgtagacaaatcctccagcacagcctacatgcagctcagcagcctgacatctgaagactctgcggtctatttctgtgcaagagtggtgtactatagtaactcttactggtacttcgatgtctggggcacagggaccacggtcaccgtctctgatccaagaaggttggacaagatagaagatgaaaggaatcttcatgaagattttgtattcatgaaaacgatacagagatgcaacacaggagaaagatccttatccttactgaactgtgaggagattaaaagccagtttgaaggctttgtgaaggatataatgttaaacaaagaggagacgaagaaagaaaacagctttgaaatgcaaaaaggtgatcagaatcctcaaattgcggcacatgtcataagtgaggccagcagtaaaacaacatctgtgttacagtgggctgaaaaaggatactacaccatgagcaacaacttggtaaccctggaaaatgggaaacagctgaccgttaaaagacaaggactctattatatctatgcccaagtcaccttctgttccaatcgggaagcttcgagtcaagctccatttatagccagcctctgcctaaagtcccccggtagattcgagagaatcttactcagagctgcaaatacccacagttccgccaaaccttgcgggcaacaatccattcacttgggaggagtatttgaattgcaaccaggtgcttcggtgtttgtcaatgtgactgatccaagccaagtgagccatggcactggcttcacgtcctttggcttactcaaactcgagtgataatctaga

SEQ ID NO: 150 - protein, 482 aa, Artificial Sequence
  Mouse-Human hybrid fusion protein
MDFQVQIFSFLLISASVIIARGQIVLSQSPAILSASPGEKVTMTCRASSSVSYMHWYQQKPGSSPKPWIYAPSNLASGVPARFSGSGSGTSYSLTISRVEAEDAATYYCQQWSFNPPTFGAGTKLELKGGGGSGGGGSGGGGSSQAYLQQSGAELVRPGASVKMSCKASGYTFTSYNMHWVKQTPRQGLEWIGAIYPGNGDTSYNQKFKGKATLTVDKSSSTAYMQLSSLTSEDSAVYFCARVVYYSNSYWYFDVWGTGTTVTVSDPRRLDKIEDERNLHEDFVFMKTIQRCNTGERSLSLLNCEEIKSQFEGFVKDIMLNKEETKKENSFEMQKGDQNPQIAAHVISEASSKTTSVLQWAEKGYYTMSNNLVTLENGKQLTVKRQGLYYIYAQVTFCSNREASSQAPFIASLCLKSPGRFERILLRAANTHSSAKPCGQQSIHLGGVFELQPGASVFVNVTDPSQVSHGTGFTSFGLLKLE

SEQ ID NO: 151 - DNA, 1290 bp, Artificial Sequence
  Mouse-Human hybrid fusion protein
aagcttgccgccatggattttcaagtgcagattttcagcttcctgctaatcagtgcttcagtcataattgccagaggacaaattgttctctcccagtctccagcaatcctgtctgcatctccaggggagaaggtcacaatgacttgcagggccagctcaagtgtaagttacatgcactggtaccagcagaagccaggatcctcccccaaaccctggatttatgccccatccaacctggcttctggagtccctgctcgcttcagtggcagtgggtctgggacctcttactctctcacaatcagcagagtggaggctgaagatgctgccacttattactgccagcagtggagttttaacccacccacgttcggtgctgggaccaagctggagctgaaaggtggcggtggctcgggcggtggtggatctggaggaggtgggagctctcaggcttatctacagcagtctggggctgagctggtgaggcctggggcctcagtgaagatgtcctgcaaggcttctggctacacatttaccagttacaatatgcactgggtaaagcagacacctagacagggcctggaatggattggagctatttatccaggaaatggtgatacttcctacaatcagaagttcaagggcaaggccacactgactgtagacaaatcctccagcacagcctacatgcagctcagcagcctgacatctgaagactctgcggtctatttctgtgcaagagtggtgtactatagtaactcttactggtacttcgatgtctggggcacagggaccacggtcaccgtctctgatccagaaaacagctttgaaatgcaaaaaggtgatcagaatcctcaaattgcggcacatgtcataagtgaggccagcagtaaaacaacatctgtgttacagtgggctgaaaaaggatactacaccatgagcaacaacttggtaaccctggaaaatgggaaacagctgaccgttaaaagacaaggactctattatatctatgcccaagtcaccttctgttccaatcgggaagcttcgagtcaagctccatttatagccagcctctgcctaaagtcccccggtagattcgagagaatcttactcagagctgcaaatacccacagttccgccaaaccttgcgggcaacaatccattcacttgggaggagtatttgaattgcaaccaggtgcttcggtgtttgtcaatgtgactgatccaagccaagtgagccatggcactggcttcacgtcctttggcttactcaaactcgagtgataatctaga

SEQ ID NO: 152 - protein, 422 aa, Artificial Sequence
  Mouse-Human hybrid fusion protein
MDFQVQIFSFLLISASVIIARGQIVLSQSPAILSASPGEKVTMTCRASSSVSYMHWYQQKPGSSPKPWIYAPSNLASGVPARFSGSGSGTSYSLTISRVEAEDAATYYCQQWSFNPPTFGAGTKLELKGGGGSGGGGSGGGGSSQAYLQQSGAELVRPGASVKMSCKASGYTFTSYNMHWVKQTPRQGLEWIGAIYPGNGDTSYNQKFKGKATLTVDKSSSTAYMQLSSLTSEDSAVYFCARVVYYSNSYWYFDVWGTGTTVTVSDPENSFEMQKGDQNPQIAAHVISEASSKTTSVLQWAEKGYYTMSNNLVTLENGKQLTVKRQGLYYIYAQVTFCSNREASSQAPFIASLCLKSPGRFERILLRAANTHSSAKPCGQQSIHLGGVFELQPGASVFVNVTDPSQVSHGTGFTSFGLLKLE

SEQ ID NO: 153 - DNA, 3630 bp, Homo sapiens
atacgggagaactaaggctgaaacctcggaggaacaaccacttttgaagtgacttcgcggcgtgcgttgggtgcggactaggtggccccggcgggagtgtgctggagcctgaagtccacgcgcgcggctgagaaccgccgggaccgcacgtgggcgccgcgcgcttcccccgcttcccaggtgggcgccggccgccaggccacctcacgtccggccccggggatgcgcgtcctcctcgccgcgctgggactgctgttcctgggggcgctacgagccttcccacaggatcgacccttcgaggacacctgtcatggaaaccccagccactactatgacaaggctgtcaggaggtgctgttaccgctgccccatggggctgttcccgacacagcagtgcccacagaggcctactgactgcaggaagcagtgtgagcctgactactacctggatgaggccgaccgctgtacagcctgcgtgacttgttctcgagatgacctcgtggagaagacgccgtgtgcatggaactcctcccgtgtctgcgaatgtcgacccggcatgttctgttccacgtctgccgtcaactcctgtgcccgctgcttcttccattctgtctgtccggcagggatgattgtcaagttcccaggcacggcgcagaagaacacggtctgtgagccggcttccccaggggtcagccctgcctgtgccagcccagagaactgcaaggaaccctccagtggcaccatcccccaggccaagcccaccccggtgtccccagcaacctccagtgccagcaccatgcctgtaagagggggcacccgcctcgcccaggaagctgcttctaaactgacgagggctcccgactctccctcctctgtgggaaggcctagttcagatccaggtctgtccccaacacagccatgcccagaggggtctggtgattgcagaaagcagtgtgagcccgactactacctggacgaggccggccgctgcacagcctgcgtgagctgttctcgagatgaccttgtggagaagacgccatgtgcatggaactcctcccgcacctgcgaatgtcgacctggcatgatctgtgccacatcagccaccaactcctgtgcccgctgtgtcccctacccaatctgtgcagcagagacggtcaccaagccccaggatatggctgagaaggacaccacctttgaggcgccacccctggggacccagccggactgcaaccccaccccagagaatggcgaggcgcctgccagcaccagccccactcagagcttgctggtggactcccaggccagtaagacgctgcccatcccaaccagcgctcccgtcgctctctcctccacggggaagcccgttctggatgcagggccagtgctcttctgggtgatcctggtgttggttgtggtggtcggctccagcgccttcctcctgtgccaccggagggcctgcaggaagcgaattcggcagaagctccacctgtgctacccggtccagacctcccagcccaagctagagcttgtggattccagacccaggaggagctcaacgcagctgaggagtggtgcgtcggtgacagaacccgtcgcggaagagcgagggttaatgagccagccactgatggagacctgccacagcgtgggggcagcctacctggagagcctgccgctgcaggatgccagcccggccgggggcccctcgtcccccagggaccttcctgagccccgggtgtccacggagcacaccaataacaagattgagaaaatctacatcatgaaggctgacaccgtgatcgtggggaccgtgaaggctgagctgccggagggccggggcctggcggggccagcagagcccgagttggaggaggagctggaggcggaccataccccccactaccccgagcaggagacagaaccgcctctgggcagctgcagcgatgtcatgctctcagtggaagaggaagggaaagaagaccccttgcccacagctgcctctggaaagtgaggcctgggctgggctggggctaggagggcagcagggtggcctctgggaggccaggatggcactgttggcaccgaggttgggggcagaggcccatctggcctgaactgaggctccagcatctagtggtggaccggccggtcactgcaggggtctggtggtctctgcttgcatccccaacttagctgtcccctgacccagagcctaggggatccggggcttgtacagaagagacagtccaaggggactggatcccagcagtgatgttggttgaggcagcaaacagatggcaggatgggcactgccgagaacagcattggtcccagagccctgggcatcagaccttaaccaccaggcccacagcccagcgagggagaggtcgtgaggccagctcccggggcccctgtaaccctactctcctctctccctggacctcagaggtgacacccattgggcccttccggcatgcccccagttactgtaaatgtggcccccagtgggcatggagccagtgcctgtggttgtttctccagagtcaaaagggaagtcgagggatggggcgtcgtcagctggcactgtctctgctgcagcggccacactgtactctgcactggtgtgagggcccctgcctggactgtgggaccctcctggtgctgcccaccttccctgtcctgtagccccctcggtgggcccagggcctaggggcccaggatcaagtcactcatctcagaatgtccccaccaatccccgccacagcaggcgcctcgggtcccagatgtctgcagccctcagcagctgcagaccgcccctcaccaacccagagaacctgctttactttgcccagggacttcctccccatgtgaacatggggaacttcgggccctgcctggagtccttgaccgctctctgtgggccccacccactctgtcctgggaaatgaagaagcatcttccttaggtctgccctgcttgcaaatccactagcaccgaccccaccacctggttccggctctgcacgctttggggtgtggatgtcgagaggcaccacggcctcacccaggcatctgctttactctggaccataggaaacaagaccgtttggaggtttcatcaggattttgggtttttcacatttcacgctaaggagtagtggccctgacttccggtcggctggccagctgactccctagggccttcagacgtgtatgcaaatgagtgatggataaggatgagtcttggagttgcgggcagcctggagactcgtggacttaccgcctggaggcaggcccgggaaggctgctgtttactcatcgggcagccacgtgctctctggaggaagtgatagtttctgaaaccgctcagatgttttggggaaagttggagaagccgtggccttgcgagaggtggttacaccagaacctggacattggccagaagaagcttaagtgggcagacactgtttgcccagtgtttgtgcaaggatggagtgggtgtctctgcatcacccacagccgcagctgtaaggcacgctggaaggcacacgcctgccaggcagggcagtctggcgcccatgatgggagggattgacatgtttcaacaaaataatgcacttccttaaaaaaaa

SEQ ID NO: 154 - protein, 595 aa, Homo sapiens
MRVLLAALGLLFLGALRAFPQDRPFEDTCHGNPSHYYDKAVRRCCYRCPMGLFPTQQCPQRPTDCRKQCEPDYYLDEADRCTACVTCSRDDLVEKTPCAWNSSRVCECRPGMFCSTSAVNSCARCFFHSVCPAGMIVKFPGTAQKNTVCEPASPGVSPACASPENCKEPSSGTIPQAKPTPVSPATSSASTMPVRGGTRLAQEAASKLTRAPDSPSSVGRPSSDPGLSPTQPCPEGSGDCRKQCEPDYYLDEAGRCTACVSCSRDDLVEKTPCAWNSSRTCECRPGMICATSATNSCARCVPYPICAAETVTKPQDMAEKDTTFEAPPLGTQPDCNPTPENGEAPASTSPTQSLLVDSQASKTLPIPTSAPVALSSTGKPVLDAGPVLFWVILVLVVVVGSSAFLLCHRRACRKRIRQKLHLCYPVQTSQPKLELVDSRPRRSSTQLRSGASVTEPVAEERGLMSQPLMETCHSVGAAYLESLPLQDASPAGGPSSPRDLPEPRVSTEHTNNKIEKIYIMKADTVIVGTVKAELPEGRGLAGPAEPELEEELEADHTPHYPEQETEPPLGSCSDVMLSVEEEGKEDPLPTAASGK

SEQ ID NO: 155 - DNA, 1824 bp, Homo sapiens
cagctctctgtcagaatggccaccatggtaccatccgtgttgtggcccagggcctgctggactctgctggtctgctgtctgctgaccccaggtgtccaggggcaggagttccttttgcgggtggagccccagaaccctgtgctctctgctggagggtccctgtttgtgaactgcagtactgattgtcccagctctgagaaaatcgccttggagacgtccctatcaaaggagctggtggccagtggcatgggctgggcagccttcaatctcagcaacgtgactggcaacagtcggatcctctgctcagtgtactgcaatggctcccagataacaggctcctctaacatcaccgtgtacgggctcccggagcgtgtggagctggcacccctgcctccttggcagccggtgggccagaacttcaccctgcgctgccaagtggagggtgggtcgccccggaccagcctcacggtggtgctgcttcgctgggaggaggagctgagccggcagcccgcagtggaggagccagcggaggtcactgccactgtgctggccagcagagacgaccacggagcccctttctcatgccgcacagaactggacatgcagccccaggggctgggactgttcgtgaacacctcagccccccgccagctccgaacctttgtcctgcccgtgacccccccgcgcctcgtggccccccggttcttggaggtggaaacgtcgtggccggtggactgcaccctagacgggctttttccagcctcagaggcccaggtctacctggcgctgggggaccagatgctgaatgcgacagtcatgaaccacggggacacgctaacggccacagccacagccacggcgcgcgcggatcaggagggtgcccgggagatcgtctgcaacgtgaccctagggggcgagagacgggaggcccgggagaacttgacggtctttagcttcctaggacccattgtgaacctcagcgagcccaccgcccatgaggggtccacagtgaccgtgagttgcatggctggggctcgagtccaggtcacgctggacggagttccggccgcggccccggggcagccagctcaacttcagctaaatgctaccgagagtgacgacggacgcagcttcttctgcagtgccactctcgaggtggacggcgagttcttgcacaggaacagtagcgtccagctgcgagtcctgtatggtcccaaaattgaccgagccacatgcccccagcacttgaaatggaaagataaaacgagacacgtcctgcagtgccaagccaggggcaacccgtaccccgagctgcggtgtttgaaggaaggctccagccgggaggtgccggtggggatcccgttcttcgtcaacgtaacacataatggtacttatcagtgccaagcgtccagctcacgaggcaaatacaccctggtcgtggtgatggacattgaggctgggagctcccactttgtccccgtcttcgtggcggtgttactgaccctgggcgtggtgactatcgtactggccttaatgtacgtcttcagggagcaccaacggagcggcagttaccatgttagggaggagagcacctatctgcccctcacgtctatgcagccgacagaagcaatgggggaagaaccgtccagagctgagtgacgctgggatccgggatcaaagttggcgggggcttggctgtgccctcagattccgcaccaataaagccttcaaactccctaaaaaaaaaaaaaaaaaaaaaaaaaaaaaaaaaaaaaaaaaaaaaaaaaaaaaaaaaaaaaaaaaaaaaaaaaaaaaaaaaaaaaa

SEQ ID NO: 156 - protein, 547 aa, Homo sapiens
MATMVPSVLWPRACWTLLVCCLLTPGVQGQEFLLRVEPQNPVLSAGGSLFVNCSTDCPSSEKIALETSLSKELVASGMGWAAFNLSNVTGNSRILCSVYCNGSQITGSSNITVYGLPERVELAPLPPWQPVGQNFTLRCQVEGGSPRTSLTVVLLRWEEELSRQPAVEEPAEVTATVLASRDDHGAPFSCRTELDMQPQGLGLFVNTSAPRQLRTFVLPVTPPRLVAPRFLEVETSWPVDCTLDGLFPASEAQVYLALGDQMLNATVMNHGDTLTATATATARADQEGAREIVCNVTLGGERREARENLTVFSFLGPIVNLSEPTAHEGSTVTVSCMAGARVQVTLDGVPAAAPGQPAQLQLNATESDDGRSFFCSATLEVDGEFLHRNSSVQLRVLYGPKIDRATCPQHLKWKDKTRHVLQCQARGNPYPELRCLKEGSSREVPVGIPFFVNVTHNGTYQCQASSSRGKYTLVVVMDIEAGSSHFVPVFVAVLLTLGVVTIVLALMYVFREHQRSGSYHVREESTYLPLTSMQPTEAMGEEPSRAE

SEQ ID NO: 157 - DNA, 5150 bp, Homo sapiens
gagggtgaccaacttagggaccctcagtccgagggcgggtggcctctccctccactccctccctctccagggccagcgggctccacggctgggaatttccccacgggtgggccgaggacaggcagctgtttcctgtgctcctgggaggaggggatttccagccccttccctgctgctctgttcctagaggcccctctccacttgcaacttcaaaaatgaacttttggataatcacaggctggtcacagttatttgaaaggtgcagaaagggcccagggagcccccagccccgcacctgctccccagctctccgggcagttcgcatcctctgggcaaacctggaacctgagaactgtttggatagaaggtggaaacctgcctgcgtgcccgtgtgcgccaggccatccaggacccaccctcaccacctcctcagaggcctgtctccaaacactgccacatgggggttagggcttccacgcaggaatttaaggggcacagttcagccatagacacctgccgtgctcaggcacactcagcgtgggctgtggtcacgggtgtctttttttttttttttgagatgagtctcgccctgtcgcccaggctggagtgcagtggcgccacctctgctttgcaacttctgtctcctgggttcgagtgattctgctacctcagcctcctgactagctgggattaccggcgcccgccaccacgcccgaataatttttgtagttttagtagagacggaatttcgccatgttagccagactggtcttgaactcctgacctcaggtgatccacccgccttggcctcccaaagtgctgggattacaggcgggagccaccgtgcctggccatgggtgtctgtcttaccatggctgtggtcactgctgctcagagctagtcttgggcatacaagggggaccatgcttcagcagtgccacagccctgaaggtccagactgaggagttgcctctcctgactcagtgctgcctcagtttacccacgtgctccatggacctttttgctgagggtcgaaccgcaggccaggccctactgtgccctggggtctgaacacggtggtcttgggcagaagaggtcagaaggcagaataagccaatgctgggggtgcccagaccccgcctttgtgcccagcccacagccagggtccccggcctgccaccttcctcctcccgcctccgctgccctcctcccctctcccctcccctcctccacagtccttatagccacaccccgcaaggaaaacccagactctggcgacagcagagacgaggatgtgcgtgggggctcggcggctgggccgcgggccgtgtgcggctctgctcctcctgggcctggggctgagcaccgtgacggggctccactgtgtcggggacacctaccccagcaacgaccggtgctgccacgagtgcaggccaggtgaggcctcaggaggggtcgccacgcacgggcactccagggactgggggctggggcagggatgggccagccaggaggctggtcctggggagggggcgggtgaggggccggccaagcctggcagaggagccgcctgggggggtccacgggcgcaagcctggggcctgaccgctgcctgacgccggcctctgctgcaggcaacgggatggtgagccgctgcagccgctcccagaacacggtgtgccgtccgtgcgggccgggcttctacaacgacgtggtcagctccaagccgtgcaagccctgcacgtggtgtaacctcagtgagctcccacctggccccacagccccacccagcacagggggcggcagcctggcacccacattcccacacagcaacatggggctcccacagccgcagaaacaaacctcaaaccacagcggggtctgctccgccacaggggtccttcgaggaaactgaggcgtctcccaggggcaccccctctccctccgggggcccaaactcggcccaggccacgtggagtcggggagaccacgctggccatgtggcctggccttgctggcctgagcagtgaggctggggggttgggccatggagaccctgccgcaggcggggctggcggctggaggcggtggaggggtagggaagggtggctggggctgccacggaaccagccccaggttgtggccaggaagggagggcccaggagcctcgggggctgcaggggctccaagtatcaggggaggccgcagacccctgcccacggccgtttgtgtggtggggaggccaacctgtcctccagtgcccacgcttcctgaggaccctgtccacagcccccacctgaccacccccccatccggcccctgctcaggaagtgggagtgagcggaagcagctgtgcacggccacacaggacacagtctgccgctgccgggcgggcacccagcccctggacagctacaagcctggagttggtgagctcggtggctgcggccggcggttgggggtgtgcatagcggctgtctgtgacgcagatgggccgtgggccgcagggacctggccccaccggtgcctcctctggcatcctcaagaccgagctcccgggtcagggcccacgggtgggatgtgggcagggagggcttccagaggccaaacccaccacccagccatggggggcaagtgcctgccccacaggctctgccccatgtccccagcacccggggcctgtgggcagcccctgaccaccctatctttgttgcagactgtgccccctgccctccagggcacttctccccaggcgacaaccaggcctgcaagccctggaccaagtgaggggcctggccaggggctgggaggggctgggggggggttggggtggttaggagggcggaggagctggggagctgggagggcctgggggggcaggtggggtgggggccagttttgggggaaggggaggtgctggtgcccctgggggcctggctatgtgcctggacctggttggggagcaggaagctgctgcctgggggcagcctttccctgtgggtggagctgggtgtgtgggaccctcaccctccgcagctgggaggccctgggggcacaggacagggaggtgctggtggggggtgtagatgtgggagaagggtgtgtggccttggaggcccctgtggggggcacgtggggctgggcagcgtccttggctgtcactggcctggtgtctgtggtagatgctgcctgtggctggccagcgtggaccctgttatccccaccgcatctcccgggtcccagggggtttctggcctgagcaacacctcctgttccccaacagctgcaccttggctgggaagcacaccctgcagccggccagcaatagctcggacgcaatctgtgaggacagggaccccccagccacgcagccccaggaaacccagggccccccggccaggcccatcactgtccagcccactgaagcctggcccagaacctcacagggaccctccacccggcccgtggaggtccccgggggtaagggagcctggcccagcccagtggggtccccatcctgaataggagaaggggagggcggaatgggggcccctcctgtggaccccacccagcagaccccttcctgcaggccgtgcggttgccgccatcctgggcctgggcctggtgctggggctgctgggccccctggccatcctgctggccctgtacctgctccggagggaccagaggctgccccccgatgcccacaagccccctggtgagtgcctcatggccctgccgcactgctcctggcgggtgaggcccacccaccaatctctccttttttcctccccagggggaggcagtttccggacccccatccaagaggagcaggccgacgcccactccaccctggccaagatctgacctgggcccaccaaggtggacgctgggccccgccaggctggagcccggagggtctgctgggcgagcagggcaggtgcaggccgcctgccccgccacgctcctgggccaactctgcaccgttctaggtgccgatggctgcctccggctctctgcttacgtatgccatgcatacctcctgccccgcgggaccacaataaaaaccttggcagacgggagtctccgaccggcactgtgggctgcacacctgtggcatggaggcttggcccgtgcccgcctctgactggagaggggtcttgggaggcttgggccgtgcccgcctctggctggacaggggtcttgggaggcttgggccgtgcccgcctctggctggagaggggtcttgggagacttgggccgtgccaacctgtggctggaaaggggtcttgggagacttgggccgtgccaacctgtggctggagaggggtcttgggagacttgggctgtgccaacctgtggctggagaggggtcttggcccagggtggaggtgagggtagcggggtcaagtgggaccctggaggttggtccctgggtgcgagttccagattgagtggggagcggggggagagactgggaaagctcaggcccaaggctgcctggggtggaggttcctggccaggcgctgacaagggcagctggcccctgagccccgggttgcccaaggagcttgggagtggctgacccccggggctctgtgtccttggaggaggagtgtagagacctgcccctcttcccctccacacctacgcccaccccttgctgcacctggaagggggtcccagggcccctgagcaccccgaggagtccctgcaaagggcccacacggcccctatgtccctgccataggtgtccagggggacagtcaccttggaaaccacagtttctgcttgagccaactttctgtccaccctgggccccggccgtcccactcctgcgcacttaagagtcctgggatctgaatgagaatgaccacagcgacttcatgtaacgtggccccacagtggagaaacccaggcatccgccagcagcgtggatgcgcgagtgctggcgtgttcagatgagctcccagctcctcggcccacaccacaggtgtccacagacgctcccaaggccctggggccgtccccggccgtgcgggaatcttctcaagctggtgtctgggagtggggtatccttcgagcagcacagagcctgctcccgagcgccagtcacacccgagaccacagctcgggaacaagacgggagc

SEQ ID NO: 158 - protein, 277 aa, Homo sapiens
MCVGARRLGRGPCAALLLLGLGLSTVTGLHCVGDTYPSNDRCCHECRPGNGMVSRCSRSQNTVCRPCGPGFYNDVVSSKPCKPCTWCNLRSGSERKQLCTATQDTVCRCRAGTQPLDSYKPGVDCAPCPPGHFSPGDNQACKPWTNCTLAGKHTLQPASNSSDAICEDRDPPATQPQETQGPPARPITVQPTEAWPRTSQGPSTRPVEVPGGRAVAAILGLGLVLGLLGPLAILLALYLLRRDQRLPPDAHKPPGGGSFRTPIQEEQADAHSTLAKI

SEQ ID NO: 159 - DNA, 1419 bp, Homo sapiens
ccacgcgtccgagaccaaggagtggaaagttctccggcagccctgagatctcaagagtgacatttgtgagaccagctaatttgattaaaattctcttggaatcagctttgctagtatcatacctgtcgcagatttcatcatgggaaacagctgttacaacatagtagccactctgttgctggtcctcaactttgagaggacaagatcattgcaggatccttgtagtaactgcccagctggtacattctgtgataataacaggaatcagatttgcagtccctgtcctccaaatagtttctccagcgcaggtggacaaaggacctgtgacatatgcaggcagtgtaaaggtgttttcaggaccaggaaggagtgttcctccaccagcaatgcagagtgtgactgcactccagggtttcactgcctgggggcaggatgcagcatgtgtgaacaggattgtaaacaaggtcaagaactgacaaaaaaaggttgtaaagactgttgctttgggacatttaacgatcagaaacgtggcatctgtcgaccctggacaaactgttctttggatggaaagtctgtgcttgtgaatgggacgaaggagagggacgtggtctgtggaccatctccagccgacctctctccgggagcatcctctgtgaccccgcctgcccctgcgagagagccaggacactctccgcagatcatctccttctttcttgcgctgacgtcgactgcgttgctcttcctgctgttcttcctcacgctccgtttctctgttgttaaacggggcagaaagaaactcctgtatatattcaaacaaccatttatgagaccagtacaaactactcaagaggaagatggctgtagctgccgatttccagaagaagaagaaggaggatgtgaactgtgaaatggaagtcaatagggctgttgggactttcttgaaaagaagcaaggaaatatgagtcatccgctatcacagctttcaaaagcaagaacaccatcctacataatacccaggattcccccaacacacgttcttttctaaatgccaatgagttggcctttaaaaatgcaccactttttttttttttttggacagggtctcactctgtcacccaggctggagtgcagtggcaccaccatggctctctgcagccttgacctctgggagctcaagtgatcctcctgcctcagtctcctgagtagctggaactacaaggaagggccaccacacctgactaacttttttgttttttgttggtaaagatggcatttcgccatgttgtacaggctggtctcaaactcctaggttcactttggcctcccaaagtgctgggattacagacatgaactgccaggcccggccaaaataatgcaccacttttaacagaacagacagatgaggacagagctggtgat

SEQ ID NO: 160 - protein, 255 aa, Homo sapiens
MGNSCYNIVATLLLVLNFERTRSLQDPCSNCPAGTFCDNNRNQICSPCPPNSFSSAGGQRTCDICRQCKGVFRTRKECSSTSNAECDCTPGFHCLGAGCSMCEQDCKQGQELTKKGCKDCCFGTFNDQKRGICRPWTNCSLDGKSVLVNGTKERDVVCGPSPADLSPGASSVTPPAPAREPGHSPQIISFFLALTSTALLFLLFFLTLRFSVVKRGRKKLLYIFKQPFMRPVQTTQEEDGCSCRFPEEEEGGCEL

SEQ ID NO: 161 - DNA, 5784 bp, Homo sapiens
aaaatataattattagggcaacattataaaatgtcacttttgctttgttttctttctttttatgcaggagaaatcaatggttctgccaattatgagatgtttatatttcacaacggaggtgtacaaattttatgcaaatatcctgacattgtccagcaatttaaaatgcagttgctgaaaggggggcaaatactctgcgatctcactaagacaaaaggaagtggaaacacagtgtccattaagagtctgaaattctgccattctcagttatccaacaacagtgtctctttttttctatacaacttggaccattctcatgccaactattacttctgcaacctatcaatttttgatcctcctccttttaaagtaactcttacaggaggatatttgcatatttatggtaagacattgctttcatcttccaaacttaagagtatatatatgttttgacaacttttctcactaataaaatcaattagacaaataaatatcttttgtgttggagttcacttagatgcagttgatggtaatcatttataatgaagatatacaggtgatgatttactattaatcataattagtattattcagcaatatgcaatgtaatcccatagactgctaagtcagaaatagatcatattgccttttaaacacatatgctattaaaaatcaggaaaaacattaagacaaatacttaaacttatggcttaataatgggtattatctctattcacctaagatttaaggtttggttttgcactgtgtttgtggaatgaagtatgatgattgaaaatcatagttttataacattacttttactattacctcttttataaaaatataggcagaaaagccctttctattaaccacatttgtaaatacattatatgcataatcttttaagttttagttcctggatccttgccataatactgagatgatgttagtctaataacttgcccacttactggatttcatgactataataaagaaaagcttcatttgattaaatagctcttttaaatttggtaagagaacttgtggttcagcagaatttttcattaacatacctttttttccaatccagaatcacaactttgttgccagctgaagttctggttacccataggatgtgcagcctttgttgtagtctgcattttgggatgcatacttatttgttggcttacaaaaaaggtaagcgatttctatctttccttgtatctgctttacagatgcacatcagtgattatttcctcatcaaaagtacacatggctcttgtcagagtaatttgaccaacagggagacaattccttccccccaagacatacctactaattaaactaatcacttggaacagaaatttatgtatttgttttatagcccacacattccaaagaggacttgacttgatggcttacagagagttacattattattattattgttcaaactagatgaggaaattgaggtcaagagaagactaaaggtcaggaggaaggttaaaacatcaaaatagatgactctgatttttaaaaaattattatgcatgggctgcgaatttgaatccaaggttcctgagaggcagggcagagatgaaacaattagttataagttttgcttagctggtaagttaaaaacagtcagcaagaaagccttctaaggtgtcaattgtagctgagaaggaaattgacaacttttttacatggtaggttattagactccttgcttttaaagaaaaccactgaggagctatttagaaagataaacaacaatgacaacaacaaaaatctccctgtgctgggggatattctttttggtctcttgcattacaggttctcaatcaaagaactgacaccactctgcatattacgcgagtatgctagtactcaagtatatccacagtgtggtcattggccagtgtatatctgtgggagagtggaatttggaaagagacataaagaaggaagagaatgagatagcgcccatggtctaagtctgctgggaaagaaacaataaaggcaaaaacgaggaagaaagttcagtagaaagctctttttatgtaaagcccttttcatattgtttttctacttagcctaaagccaggaacctaagtcacattatcatgtttttgtcacataccacttcaacaaagaatagaaaacagtcaaaaaacaaagagatggagaagaaaagatgaccaagcatgtttctggctttttctttcagaagtattcatccagtgtgcacgaccctaacggtgaatacatgttcatgagagcagtgaacacagccaaaaaatctagactcacaggtatgactccatttgggggtttgggaagggaagaggtttcttcacagtaagcctggaatgttaatttttttttttttaattttaaaggaaaggaaaacatctccaaggcctaattctagaattttctgtgaaaatctggatttctcacttttaactagatttatattttctgcagtatattgaaaacaaacaagcaataggtttgtaagccactattgaaactaaacacacaaacagctcataaaccaccatagtatcaaggcaattttcccattgatgtttcaaaagttgggatgattctaagtgttttttgttgaagggttcattcagtcattcaatgagcgtttattgagcatcagttaagtgtgagttactgagtgaggcactctggggaatttggacagatatatgctaattttggactgagattaggaagagagatctgtgctggtactgctagagggaagaaggagaaattgatgaagatatctggttattttgaggtaaagagtgtgcaagtttagagaacttggatggctttagaagtctcagtaacatggaaatttgaccttttctgttaagagtcagaaaactgaaagttgccaagtttgaggagcacccagaaagtttgaagcttccattgtggaaaattcatgtcttatgcccttgaggttcgaatgatgtgcgatgtgtaatgagacagaagccactgcatttttccacccctcagtggctacagattatctaaaggggacacacatagcttgcgttgtcatggaattatagcatgggatgggagctaaaaaggatccttgagttcacatttcatgttttagatgacagaaattgatgctcaaagtgttcagtgactcttttggttccctagacagttaatacctagctttgacacttgcaaagagcttatgtttcattactttgctgtttaaaaaatatatgatctctcaatctctttgcttaatgtgttctggctgtttggatccccacaagcagaacctgacataaggacttgggtgcaagtagtttatttgggaggtgatcccaggaagaaggggtgagggggcagggagagtgagacagccaacaaggagaagcaaatgaagggcgcattattatcaaggtctcagctccaggccacagaggcctgacttcattggacctctgagaagtgtacagatgcctcccagaatcattctcttgaaggatggcaaccactggctccatcctcactgatttggggttgcctgcggagggcattagctttccctcatctctgagctgtgcctctacttgggatgagcctacttgggatgagtcttcagagaaagtctggaggcagaaaagcagtgaaatgcagtggggctgttgtgctagaacagtcagcccatgcagcgctttctgccccagcagcagctgcaatcagaggtggacagtttcaaagtgatgagtttagataatgtctgttataggagtcgagagctaaacttctctggaaatggggaactggtgctgggtgttgaagcataaagatgagtttgcatggtgtgtgtgtgagtgtgtgtgtgtgtgtgtgtgcacgtgtgtgtttgtgtgtatgaaaggcaatggagaggggaaagcttcttgtagggaactggcacatggagagcatttagagaatttatgctgaatttttgttacagatgtgaccctataatatggaactctggcacccaggcatgaagcacgttggccagttttcctcaacttgaagtgcaagattctcttatttccgggaccacggagagtctgacttaactacatacatcttctgctggtgttttgttcaatctggaagaatgactgtatcagtcaatggggattttaacagactgccttggtactgccgagtcctctcaaaacaaacaccctcttgcaaccagctttggagaaagcccagctcctgtgtgctcactgggagtggaatccctgtctccacatctgctcctagcagtgcatcagccagtaaaacaaacacatttacaagaaaaatgttttaaagatgccaggggtactgaatctgcaaagcaaatgagcagccaaggaccagcatctgtccgcatttcactatcatactacctcttctttctgtagggatgagaattcctcttttaatcagtcaagggagatgcttcaaagctggagctattttatttctgagatgttgatgtgaactgtacattagtacatactcagtactctccttcaattgctgaaccccagttgaccattttaccaagactttagatgctttcttgtgccctcaattttctttttaaaaatacttctacatgactgcttgacagcccaacagccactctcaatagagagctatgtcttacattctttcctctgctgctcaatagttttatatatctatgcatacatatatacacacatatgtatataaaattcataatgaatatatttgcctatattctccctacaagaatatttttgctccagaaagacatgttcttttctcaaattcagttaaaatggtttactttgttcaagttagtggtaggaaacattgcccggaattgaaagcaaatttattttattatcctattttctaccattatctatgttttcatggtgctattaattacaagtttagttctttttgtagatcatattaaaattgcaaacaaaatcatctttaatgggccagcattctcatggggtagagcagaatattcatttagcctgaaagctgcagttactataggttgctgtcagactatacccatggtgcctctgggcttgacaggtcaaaatggtccccatcagcctggagcagccctccagacctgggtggaattccagggttgagagactcccctgagccagaggccactaggtattcttgctcccagaggctgaagtcaccctgggaatcacagtggtctacctgcattcataattccaggatctgtgaagagcacatatgtgtcagggcacaattccctctcataaaaaccacacagcctggaaattggccctggcccttcaagatagccttctttagaatatgatttggctagaaagattcttaaatatgtggaatatgattattcttagctggaatattttctctacttcctgtctgcatgcccaaggcttctgaagcagccaatgtcgatgcaacaacatttgtaactttaggtaaactgggattatgttgtagtttaacattttgtaactgtgtgcttatagtttacaagtgagacccgatatgtcattatgcatacttatattatcttaagcatgtgtaatgctggatgtgtacagtacagtactgaacttgtaatttgaatctagtatggtgttctgttttcagctgacttggacaacctgactggctttgcacaggtgttccctgagttgtttgcaggtttctgtgtgtggg

SEQ ID NO: 162 - protein, 199 aa, Homo sapiens
MKSGLWYFFLFCLRIKVLTGEINGSANYEMFIFHNGGVQILCKYPDIVQQFKMQLLKGGQILCDLTKTKGSGNTVSIKSLKFCHSQLSNNSVSFFLYNLDHSHANYYFCNLSIFDPPPFKVTLTGGYLHIYESQLCCQLKFWLPIGCAAFVVVCILGCILICWLTKKKYSSSVHDPNGEYMFMRAVNTAKKSRLTDVTL

SEQ ID NO: 163 - DNA, 822 bp, Homo sapiens
gggctgctccacgcttttgccggagacagagactgacatggaacaggggaagggcctggctgtcctcatcctggctatcattcttcttcaaggtactttggcccagtcaatcaaaggaaaccacttggttaaggtgtatgactatcaagaagatggttcggtacttctgacttgtgatgcagaagccaaaaatatcacatggtttaaagatgggaagatgatcggcttcctaactgaagataaaaaaaaatggaatctgggaagtaatgccaaggaccctcgagggatgtatcagtgtaaaggatcacagaacaagtcaaaaccactccaagtgtattacagaatgtgtcagaactgcattgaactaaatgcagccaccatatctggctttctctttgctgaaatcgtcagcattttcgtccttgctgttggggtctacttcattgctggacaggatggagttcgccagtcgagagcttcagacaagcagactctgttgcccaatgaccagctctaccagcccctcaaggatcgagaagatgaccagtacagccaccttcaaggaaaccagttgaggaggaattgaactcaggactcagagtagtccaggtgttctcctcctattcagttcccagaatcaaagcaatgcattttggaaagctcctagcagagagactttcagccctaaatctagactcaaggttcccagagatgacaaatggagaagaaaggccatcagagcaaatttgggggtttctcaaataaaataaaaataaaaacaaatactgtgtttcagaagcgccacctattggggaaaattgt

SEQ ID NO: 164 - protein, 182 aa, Homo sapiens
MEQGKGLAVLILAIILLQGTLAQSIKGNHLVKVYDYQEDGSVLLTCDAEAKNITWFKDGKMIGFLTEDKKKWNLGSNAKDPRGMYQCKGSQNKSKPLQVYYRMCQNCIELNAATISGFLFAEIVSIFVLAVGVYFIAGQDGVRQSRASDKQTLLPNDQLYQPLKDREDDQYSHLQGNQLRRN

SEQ ID NO: 165 - DNA, 1311 bp, Homo sapiens
gtaagtctgctggcctccgccatcttagtaaagtaacagtcccatgaaacaaagatgcagtcgggcactcactggagagttctgggcctctgcctcttatcagttggcgtttgggggcaagatggtaatgaagaaatgggtggtattacacagacaccatataaagtctccatctctggaaccacagtaatattgacatgccctcagtatcctggatctgaaatactatggcaacacaatgataaaaacataggcggtgatgaggatgataaaaacataggcagtgatgaggatcacctgtcactgaaggaattttcagaattggagcaaagtggttattatgtctgctaccccagaggaagcaaaccagaagatgcgaacttttatctctacctgagggcaagagtgtgtgagaactgcatggagatggatgtgatgtcggtggccacaattgtcatagtggacatctgcatcactgggggcttgctgctgctggtttactactggagcaagaatagaaaggccaaggccaagcctgtgacacgaggagcgggtgctggcggcaggcaaaggggacaaaacaaggagaggccaccacctgttcccaacccagactatgagcccatccggaaaggccagcgggacctgtattctggcctgaatcagagacgcatctgaccctctggagaacactgcctcccgctggcccaggtctcctctccagtccccctgcgactccctgtttcctgggctagtcttggaccccacgagagagaatcgttcctcagcctcatggtgaactcgcgccctccagcctgatcccccgctccctcctccctgccttctctgctggtacccagtcctaaaatattgctgcttcctcttcctttgaagcatcatcagtagtcacaccctcacagctggcctgccctcttgccaggatatttatttgtgctattcactcccttccctttggatgtaacttctccgttcagttccctccttttcttgcatgtaagttgtcccccatcccaaagtattccatctacttttctatcgccgtccccttttgcagccctctctggggatggactgggtaaatgttgacagaggccctgccccgttcacagatcctggccctgagccagccctgtgctcctccctcccccaacactccctaccaaccccctaatcccctactccctccaaccccccctcccactgtaggccactggatggtcatttggcatctccgtatatgtgctctggctcctcagctgagagagaaaaaaataaactgtatttggctgc

SEQ ID NO: 166 - protein, 207 aa, Homo sapiens
MQSGTHWRVLGLCLLSVGVWGQDGNEEMGGITQTPYKVSISGTTVILTCPQYPGSEILWQHNDKNIGGDEDDKNIGSDEDHLSLKEFSELEQSGYYVCYPRGSKPEDANFYLYLRARVCENCMEMDVMSVATIVIVDICITGGLLLLVYYWSKNRKAKAKPVTRGAGAGGRQRGQNKERPPPVPNPDYEPIRKGQRDLYSGLNQRRI

SEQ ID NO: 167 - DNA, 3 bp, Homo sapiens  - to be filled in
  misc_feature 1, 2, 3: n = A,T,C or G
nnn

SEQ ID NO: 168 - protein, 2 aa, Homo sapiens - to be filled in
  VARIANT 1, 2: Xaa = Any Amino Acid
XX

SEQ ID NO: 169 - DNA, 3084 bp, Homo sapiens
ctgggctcctggttgcagagctccaagtcctcacacagatacgcctgtttgagaagcagcgggcaagaaagacgcaagcccagaggccctgccatttctgtgggctcaggtccctactggctcaggcccctgcctccctcggcaaggccacaatgaaccggggagtcccttttaggcacttgcttctggtgctgcaactggcgctcctcccagcagccactcagggaaagaaagtggtgctgggcaaaaaaggggatacagtggaactgacctgtacagcttcccagaagaagagcatacaattccactggaaaaactccaaccagataaagattctgggaaatcagggctccttcttaactaaaggtccatccaagctgaatgatcgcgctgactcaagaagaagcctttgggaccaaggaaactttcccctgatcatcaagaatcttaagatagaagactcagatacttacatctgtgaagtggaggaccagaaggaggaggtgcaattgctagtgttcggattgactgccaactctgacacccacctgcttcaggggcagagcctgaccctgaccttggagagcccccctggtagtagcccctcagtgcaatgtaggagtccaaggggtaaaaacatacagggggggaagaccctctccgtgtctcagctggagctccaggatagtggcacctggacatgcactgtcttgcagaaccagaagaaggtggagttcaaaatagacatcgtggtgctagctttccagaaggcctccagcatagtctataagaaagagggggaacaggtggagttctccttcccactcgcctttacagttgaaaagctgacgggcagtggcgagctgtggtggcaggcggagagggcttcctcctccaagtcttggatcacctttgacctgaagaacaaggaagtgtctgtaaaacgggttacccaggaccctaagctccagatgggcaagaagctcccgctccacctcaccctgccccaggccttgcctcagtatgctggctctggaaacctcaccctggcccttgaagcgaaaacaggaaagttgcatcaggaagtgaacctggtggtgatgagagccactcagctccagaaaaatttgacctgtgaggtgtggggacccacctcccctaagctgatgctgagcttgaaactggagaacaaggaggcaaaggtctcgaagcgggagaaggcggtgtgggtgctgaaccctgaggcggggatgtggcagtgtctgctgagtgactcgggacaggtcctgctggaatccaacatcaaggttctgcccacatggtccaccccggtgcagccaatggccctgattgtgctggggggcgtcgccggcctcctgcttttcattgggctaggcatcttcttctgtgtcaggtgccggcaccgaaggcgccaagcagagcggatgtctcagatcaagagactcctcagtgagaagaagacctgccagtgccctcaccggtttcagaagacatgtagccccatttgaggcacgaggccaggcagatcccacttgcagcctccccaggtgtctgccccgcgtttcctgcctgcggaccagatgaatgtagcagatcccaggcctctggcctcctgttcgcctcctctacaatttgccattgtttctcctgggttaggccccggcttcactggttgagtgttgctctctagtttccagaggcttaatcacaccgtcctccacgccatttccttttccttcaagcctagcccttctctcattatttctctctgaccctctccccactgctcatttggatcccaggggagtgttcagggccagccctggctggcatggagggtgaggctgggtgtctggaagcatggagcatgggactgttcttttacaagacaggaccctgggaccacagagggcaggagcttgcacgaaatcacacagccaagccagtcaaggatggatgcagatccagaggtttctggcagccagtacctcctgccccatgctgcccgcttctcaccctatgtgggtggggccacagactcacatcctgaccttgcacaaacagcccctctggacacagccccatgtacacggcctcaagggatgtctcacatcctctgtctatttgagacttagaaaaatcctacaaggctggcagtgacagaactaagatgatcatctccagtttatagaccagaaccagagctcagagaggctagatgattgattaccaagtgccggactagcaagtgctggagtcgggactaacccaggtcccttgtcccaagttccactgctgcctcttgaatgcagggacaaatgccacacggctctcaccagtggctagtggtgggtactcaatgtgtacttttgggttcacagaagcacagcacccatgggaagggtccatctcagagaatttacgagcagggatgaaggcctccctgtctaaaatccctccttcatcccccgctggtggcagaatctgttaccagaggacaaagcctttggctcttctaatcagagtgcaagctgggagcacaggcactgcaggagagaatgcccagtgaccagtcactgaccctgtgcagaacctcctggaagcgagctttgctgggagagggggtagctagcctgagagggaaccctccaagggacctcaaaggtgattgtgccaggctctgcgcctgccccacaccctcccttaccctcctccagaccattcaggacacagggaaatcagggttacaaatcttcttgatccacttctctcaggatcccctctcttcctacccttcctcaccacttccctcagtcccaactccttttccctatttccttctcctcctgtctttaaagcctgcctcttccaggaagacccccctattgctgctggggctccccatttgcttactttgcatttgtgcccactctccacccctgctcccctgagctgaaataaaaatacaataaacttactataaagataaaaaaaaaaaaaaaaaaaaaaaaaaaaaaaaaaaaaaaaaaaaaaaaaaaaaaaaaaaaaaaaaaaaaaaaaaaa

SEQ ID NO: 170 - protein, 458 aa, Homo sapiens
MNRGVPFRHLLLVLQLALLPAATQGKKVVLGKKGDTVELTCTASQKKSIQFHWKNSNQIKILGNQGSFLTKGPSKLNDRADSRRSLWDQGNFPLIIKNLKIEDSDTYICEVEDQKEEVQLLVFGLTANSDTHLLQGQSLTLTLESPPGSSPSVQCRSPRGKNIQGGKTLSVSQLELQDSGTWTCTVLQNQKKVEFKIDIVVLAFQKASSIVYKKEGEQVEFSFPLAFTVEKLTGSGELWWQAERASSSKSWITFDLKNKEVSVKRVTQDPKLQMGKKLPLHLTLPQALPQYAGSGNLTLALEAKTGKLHQEVNLVVMRATQLQKNLTCEVWGPTSPKLMLSLKLENKEAKVSKREKAVWVLNPEAGMWQCLLSDSGQVLLESNIKVLPTWSTPVQPMALIVLGGVAGLLLFIGLGIFFCVRCRHRRRQAERMSQIKRLLSEKKTCQCPHRFQKTCSPI

SEQ ID NO: 171 - DNA, 2308 bp, Homo sapiens
gagagactggatggacccacaagggtgacagcccaggcggaccgatcttcccatcccacatcctccggcgcgatgccaaaaagaggctgacggcaactgggccttctgcagagaaagacctccgcttcactgccccggctggtcccaagggtcaggaagatggattcatacctgctgatgtggggactgctcacgttcatcatggtgcctggctgccaggcagagctctgtgacgatgacccgccagagatcccacacgccacattcaaagccatggcctacaaggaaggaaccatgttgaactgtgaatgcaagagaggtttccgcagaataaaaagcgggtcactctatatgctctgtacaggaaactctagccactcgtcctgggacaaccaatgtcaatgcacaagctctgccactcggaacacaacgaaacaagtgacacctcaacctgaagaacagaaagaaaggaaaaccacagaaatgcaaagtccaatgcagccagtggaccaagcgagccttccaggtcactgcagggaacctccaccatgggaaaatgaagccacagagagaatttatcatttcgtggtggggcagatggtttattatcagtgcgtccagggatacagggctctacacagaggtcctgctgagagcgtctgcaaaatgacccacgggaagacaaggtggacccagccccagctcatatgcacaggtgaaatggagaccagtcagtttccaggtgaagagaagcctcaggcaagccccgaaggccgtcctgagagtgagacttcctgcctcgtcacaacaacagattttcaaatacagacagaaatggctgcaaccatggagacgtccatatttacaacagagtaccaggtagcagtggccggctgtgttttcctgctgatcagcgtcctcctcctgagtgggctcacctggcagcggagacagaggaagagtagaagaacaatctagaaaaccaaaagaacaagaatttcttggtaagaagccgggaacagacaacagaagtcatgaagcccaagtgaaatcaaaggtgctaaatggtcgcccaggagacatccgttgtgcttgcctgcgttttggaagctctgaagtcacatcacaggacacggggcagtggcaaccttgtctctatgccagctcagtcccatcagagagcgagcgctacccacttctaaatagcaatttcgccgttgaagaggaagggcaaaaccactagaactctccatcttattttcatgtatatgtgttcattaaagcatgaatggtatggaactctctccaccctatatgtagtataaagaaaagtaggtttacattcatctcattccaacttcccagttcaggagtcccaaggaaagccccagcactaacgtaaatacacaacacacacactctaccctatacaactggacattgtctgcgtggttcctttctcagccgcttctgactgctgattctcccgttcacgttgcctaataaacatccttcaagaactctgggctgctacccagaaatcattttacccttggctcaatcctctaagctaacccccttctactgagccttcagtcttgaatttctaaaaaacagaggccatggcagaataatctttgggtaacttcaaaacggggcagccaaacccatgaggcaatgtcaggaacagaaggatgaatgaggtcccaggcagagaatcatacttagcaaagttttacctgtgcgttactaattggcctctttaagagttagtttctttgggattgctatgaatgataccctgaatttggcctgcactaatttgatgtttacaggtggacacacaaggtgcaaatcaatgcgtacgtttcctgagaagtgtctaaaaacaccaaaaagggatccgtacattcaatgtttatgcaaggaaggaaagaaagaaggaagtgaagagggagaagggatggaggtcacactggtagaacgtaaccacggaaaagagcgcatcaggcctggcacggtggctcaggcctataaccccagctccctaggagaccaaggcgggagcatctcttgaggccaggagtttgagaccagcctgggcagcatagcaagacacatccctacaaaaaattagaaattggctggatgtggtggcatacgcctgtagtcctagccactcaggaggctgaggcaggaggattgcttgagcccaggagttcgaggctgcagtcagtcatgatggcaccactgcactccagcctgggcaacagagcaagatcctgtctttaaggaaaaaaagacaagg

SEQ ID NO: 172 - protein, 272 aa, Homo sapiens
MDSYLLMWGLLTFIMVPGCQAELCDDDPPEIPHATFKAMAYKEGTMLNCECKRGFRRIKSGSLYMLCTGNSSHSSWDNQCQCTSSATRNTTKQVTPQPEEQKERKTTEMQSPMQPVDQASLPGHCREPPPWENEATERIYHFVVGQMVYYQCVQGYRALHRGPAESVCKMTHGKTRWTQPQLICTGEMETSQFPGEEKPQASPEGRPESETSCLVTTTDFQIQTEMAATMETSIFTTEYQVAVAGCVFLLISVLLLSGLTWQRRQRKSRRTI

SEQ ID NO: 173 - DNA, 1060 bp, Homo sapiens
cggctcccgcgccgcctcccctcgcgcccgagcttcgagccaagcagcgtcctggggagcgcgtcatggccttaccagtgaccgccttgctcctgccgctggccttgctgctccacgccgccaggccgagccagttccgggtgtcgccgctggatcggacctggaacctgggcgagacagtggagctgaagtgccaggtgctgctgtccaacccgacgtcgggctgctcgtggctcttccagccgcgcggcgccgccgccagtcccaccttcctcctatacctctcccaaaacaagcccaaggcggccgaggggctggacacccagcggttctcgggcaagaggttgggggacaccttcgtcctcaccctgagcgacttccgccgagagaacgagggctactatttctgctcggccctgagcaactccatcatgtacttcagccacttcgtgccggtcttcctgccagcgaagcccaccacgacgccagcgccgcgaccaccaacaccggcgcccaccatcgcgtcgcagcccctgtccctgcgcccagaggcgtgccggccagcggcggggggcgcagtgcacacgagggggctggacttcgcctgtgatatctacatctgggcgcccttggccgggacttgtggggtccttctcctgtcactggttatcaccctttactgcaaccacaggaaccgaagacgtgtttgcaaatgtccccggcctgtggtcaaatcgggagacaagcccagcctttcggcgagatacgtctaaccctgtgcaacagccactacattacttcaaactgagatccttccttttgagggagcaagtccttccctttcattttttccagtcttcctccctgtgtattcattctcatgattattattttagtgggggcggggtgggaaagattactttttctttatgtgtttgacgggaaacaaaactaggtaaaatctacagtacaccacaagggtcacaatactgttgtgcgcacatcgcggtagggcgtggaaaggggcaggccagagctacccgcagagttctcagaatca

SEQ ID NO: 174 - protein, 235 aa, Homo sapiens
MALPVTALLLPLALLLHAARPSQFRVSPLDRTWNLGETVELKCQVLLSNPTSGCSWLFQPRGAAASPTFLLYLSQNKPKAAEGLDTQRFSGKRLGDTFVLTLSDFRRENEGYYFCSALSNSIMYFSHFVPVFLPAKPTTTPAPRPPTPAPTIASQPLSLRPEACRPAAGGAVHTRGLDFACDIYIWAPLAGTCGVLLLSLVITLYCNHRNRRRVCKCPRPVVKSGDKPSLSARYV

SEQ ID NO: 175 - DNA, 4740 bp, Homo sapiens
gaattccgtggttcctcagtggtgcctgcaacccctggttcacctccttccaggttctggctccttccagccatggctctcagagtccttctgttaacagccttgaccttatgtcatgggttcaacttggacactgaaaacgcaatgaccttccaagagaacgcaaggggcttcgggcagagcgtggtccagcttcagggatccagggtggtggttggagccccccaggagatagtggctgccaaccaaaggggcagcctctaccagtgcgactacagcacaggctcatgcgagcccatccgcctgcaggtccccgtggaggccgtgaacatgtccctgggcctgtccctggcagccaccaccagcccccctcagctgctggcctgtggtcccaccgtgcaccagacttgcagtgagaacacgtatgtgaaagggctctgcttcctgtttggatccaacctacggcagcagccccagaagttcccagaggccctccgagggtgtcctcaagaggatagtgacattgccttcttgattgatggctctggtagcatcatcccacatgactttcggcggatgaaggagtttgtctcaactgtgatggagcaattaaaaaagtccaaaaccttgttctctttgatgcagtactctgaagaattccggattcactttaccttcaaagagttccagaacaaccctaacccaagatcactggtgaagccaataacgcagctgcttgggcggacacacacggccacgggcatccgcaaagtggtacgagagctgtttaacatcaccaacggagcccgaaagaatgcctttaagatcctagttgtcatcacggatggagaaaagtttggcgatcccttgggatatgaggatgtcatccctgaggcagacagagagggagtcattcgctacgtcattggggtgggagatgccttccgcagtgagaaatcccgccaagagcttaataccatcgcatccaagccgcctcgtgatcacgtgttccaggtgaataactttgaggctctgaagaccattcagaaccagcttcgggagaagatctttgcgatcgagggtactcagacaggaagtagcagctcctttgagcatgagatgtctcaggaaggcttcagcgctgccatcacctctaatggccccttgctgagcactgtggggagctatgactgggctggtggagtctttctatatacatcaaaggagaaaagcaccttcatcaacatgaccagagtggattcagacatgaatgatgcttacttgggttatgctgccgccatcatcttacggaaccgggtgcaaagcctggttctgggggcacctcgatatcagcacatcggcctggtagcgatgttcaggcagaacactggcatgtgggagtccaacgctaatgtcaagggcacccagatcggcgcctacttcggggcctccctctgctccgtggacgtggacagcaacggcagcaccgacctggtcctcatcggggccccccattactacgagcagacccgagggggccaggtgtccgtgtgccccttgcccagggggcagagggctcggtggcagtgtgatgctgttctctacggggagcagggccaaccctggggccgctttggggcagccctaacagtgctgggggacgtaaatggggacaagctgacggacgtggccattggggccccaggagaggaggacaaccggggtgctgtttacctgtttcacggaacctcaggatctggcatcagcccctcccatagccagcggatagcaggctccaagctctctcccaggctccagtattttggtcagtcactgagtgggggccaggacctcacaatggatggactggtagacctgactgtaggagcccaggggcacgtgctgctgctcaggtcccagccagtactgagagtcaaggcaatcatggagttcaatcccagggaagtggcaaggaatgtatttgagtgtaatgatcaggtggtgaaaggcaaggaagccggagaggtcagagtctgcctccatgtccagaagagcacacgggatcggctaagagaaggacagatccagagtgttgtgacttatgacctggctctggactccggccgcccacattcccgcgccgtcttcaatgagacaaagaacagcacacgcagacagacacaggtcttggggctgacccagacttgtgagaccctgaaactacagttgccgaattgcatcgaggacccagtgagccccattgtgctgcgcctgaacttctctctggtgggaacgccattgtctgctttcgggaacctccggccagtgctggcggaggatgctcagagactcttcacagccttgtttccctttgagaagaattgtggcaatgacaacatctgccaggatgacctcagcatcaccttcagtttcatgagcctggactgcctcgtggtgggtgggccccgggagttcaacgtgacagtgactgtgagaaatgatggtgaggactcctacaggacacaggtcaccttcttcttcccgcttgacctgtcctaccggaaggtgtccacactccagaaccagcgctcacagcgatcctggcgcctggcctgtgagtctgcctcctccaccgaagtgtctggggccttgaagagcaccagctgcagcataaaccaccccatcttcccggaaaactcagaggtcacctttaatatcacgtttgatgtagactctaaggcttcccttggaaacaaactgctcctcaaggccaatgtgaccagtgagaacaacatgcccagaaccaacaaaaccgaattccaactggagctgccggtgaaatatgctgtctacatggtggtcaccagccatggggtctccactaaatatctcaacttcacggcctcagagaataccagtcgggtcatgcagcatcaatatcaggtcagcaacctggggcagaggagcctccccatcagcctggtgttcttggtgcccgtccggctgaaccagactgtcatatgggaccgcccccaggtcaccttctccgagaacctctcgagtacgtgccacaccaaggagcgcttgccctctcactccgactttctggctgagcttcggaaggcccccgtggtgaactgctccatcgctgtctgccagagaatccagtgtgacatcccgttctttggcatccaggaagaattcaatgctaccctcaaaggcaacctctcgtttgactggtacatcaagacctcgcataaccacctcctgatcgtgagcacagctgagatcttgtttaacgattccgtgttcaccctgctgccgggacagggggcgtttgtgaggtcccagacggagaccaaagtggagccgttcgaggtccccaaccccctgccgctcatcgtgggcagctctgtcgggggactgctgctcctggccctcatcaccgccgcgctgtacaagctcggcttcttcaagcggcaatacaaggacatgatgagtgaagggggtcccccgggggccgaaccccagtagcggctccttcccgacagagctgcctctcggtggccagcaggactctgcccagaccacacgtagcccccaggctgctggacacgtcggacagcgaagtatccccgacaggacgggcttgggcttccatttgtgtgtgtgcaagtgtgtatgtgcgtgtgtgcgagtgtgtgcaagtgtctgtgtgcaagtgtgtgcacgtgtgcgtgtgcgtgcatgtgcactcgcacgcccatgtgtgagtgtgtgcaagtatgtgagtgtgtccagtgtgtgtgcgtgtgtccatgtgtgtgcagtgtgtgcatgtgtgcgagtgtgtgcatgtgtgtgctcaggggctgtggctcacgtgtgtgactcagagtgtctctggcgtgtgggtaggtgacggcagcgtagcctctccggcagaagggaactgcctgggctcccttgtgcgtgggtaagccgctgctgggttttcctccgggagaggggacggtcaatcctgtgggtgaagagagagggaaacacagcagcatctctccactgaaagaagtgggacttcccgtcgcctgcgagcctgcggcctgctggagcctgcgcagcttggatggatactccatgagaaaagccgtgggtggaaccaggagcctcctccacaccagcgctgatgcccaataaagatgcccactgaggaatcatgaagcttcctttctggattcatttattatttcaatgtgactttaattttttggatggataagcctgtctatggtacaaaaatcacaaggcattcaagtgtacagtgaaaagtctccctttccagatattcaagtcacctccttaaaggtagtcaagattgtgttttgaggtttccttcagacagattccaggcgatgtgcaagtgtatgcacgtgtgcacacaccacacacatacacacacacaagcttttttacacaaatggtagcatactttatattggtctgtatcttgctttttttcaccaatatttctcagacatcggttcatattaagacataaattactttttcattcttttataccgctgcatagtattccattgtgtgagtgtaccataatgtatttaaccagtcttcttttgatatactattttcatctcttgttattgcatctgctgagttaataaatcaaatatatgtcaaaaaaaaaaaaaaaaaaaaaaaaaaaaaaaaaaaaaaaaa

SEQ ID NO: 176 - protein, 1153 aa, Homo sapiens
MALRVLLLTALTLCHGFNLDTENAMTFQENARGFGQSVVQLQGSRVVVGAPQEIVAANQRGSLYQCDYSTGSCEPIRLQVPVEAVNMSLGLSLAATTSPPQLLACGPTVHQTCSENTYVKGLCFLFGSNLRQQPQKFPEALRGCPQEDSDIAFLIDGSGSIIPHDFRRMKEFVSTVMEQLKKSKTLFSLMQYSEEFRIHFTFKEFQNNPNPRSLVKPITQLLGRTHTATGIRKVVRELFNITNGARKNAFKILVVITDGEKFGDPLGYEDVIPEADREGVIRYVIGVGDAFRSEKSRQELNTIASKPPRDHVFQVNNFEALKTIQNQLREKIFAIEGTQTGSSSSFEHEMSQEGFSAAITSNGPLLSTVGSYDWAGGVFLYTSKEKSTFINMTRVDSDMNDAYLGYAAAIILRNRVQSLVLGAPRYQHIGLVAMFRQNTGMWESNANVKGTQIGAYFGASLCSVDVDSNGSTDLVLIGAPHYYEQTRGGQVSVCPLPRGQRARWQCDAVLYGEQGQPWGRFGAALTVLGDVNGDKLTDVAIGAPGEEDNRGAVYLFHGTSGSGISPSHSQRIAGSKLSPRLQYFGQSLSGGQDLTMDGLVDLTVGAQGHVLLLRSQPVLRVKAIMEFNPREVARNVFECNDQVVKGKEAGEVRVCLHVQKSTRDRLREGQIQSVVTYDLALDSGRPHSRAVFNETKNSTRRQTQVLGLTQTCETLKLQLPNCIEDPVSPIVLRLNFSLVGTPLSAFGNLRPVLAEDAQRLFTALFPFEKNCGNDNICQDDLSITFSFMSLDCLVVGGPREFNVTVTVRNDGEDSYRTQVTFFFPLDLSYRKVSTLQNQRSQRSWRLACESASSTEVSGALKSTSCSINHPIFPENSEVTFNITFDVDSKASLGNKLLLKANVTSENNMPRTNKTEFQLELPVKYAVYMVVTSHGVSTKYLNFTASENTSRVMQHQYQVSNLGQRSLPISLVFLVPVRLNQTVIWDRPQVTFSENLSSTCHTKERLPSHSDFLAELRKAPVVNCSIAVCQRIQCDIPFFGIQEEFNATLKGNLSFDWYIKTSHNHLLIVSTAEILFNDSVFTLLPGQGAFVRSQTETKVEPFEVPNPLPLIVGSSVGGLLLLALITAALYKLGFFKRQYKDMMSEGGPPGAEPQ

SEQ ID NO: 177 - DNA, 1364 bp, Homo sapiens
gccgaagagttcacaagtgtgaagcctggaagccggcgggtgccgctgtgtaggaaagaagctaaagcacttccagagcctgtccggagctcagaggttcggaagacttatcgaccatggagcgcgcgtcctgcttgttgctgctgctgctgccgctggtgcacgtctctgcgaccacgccagaaccttgtgagctggacgatgaagatttccgctgcgtctgcaacttctccgaacctcagcccgactggtccgaagccttccagtgtgtgtctgcagtagaggtggagatccatgccggcggtctcaacctagagccgtttctaaagcgcgtcgatgcggacgccgacccgcggcagtatgctgacacggtcaaggctctccgcgtgcggcggctcacagtgggagccgcacaggttcctgctcagctactggtaggcgccctgcgtgtgctagcgtactcccgcctcaaggaactgacgctcgaggacctaaagataaccggcaccatgcctccgctgcctctggaagccacaggacttgcactttccagcttgcgcctacgcaacgtgtcgtgggcgacagggcgttcttggctcgccgagctgcagcagtggctcaagccaggcctcaaggtactgagcattgcccaagcacactcgcctgccttttcctgcgaacaggttcgcgccttcccggcccttaccagcctagacctgtctgacaatcctggactgggcgaacgcggactgatggcggctctctgtccccacaagttcccggccatccagaatctagcgctgcgcaacacaggaatggagacgcccacaggcgtgtgcgccgcactggcggcggcaggtgtgcagccccacagcctagacctcagccacaactcgctgcgcgccaccgtaaaccctagcgctccgagatgcatgtggtccagcgccctgaactccctcaatctgtcgttcgctgggctggaacaggtgcctaaaggactgccagccaagctcagagtgctcgatctcagctgcaacagactgaacagggcgccgcagcctgacgagctgcccgaggtggataacctgacactggacgggaatcccttcctggtccctggaactgccctcccccacgagggctcaatgaactccggcgtggtcccagcctgtgcacgttcgaccctgtcggtgggggtgtcgggaaccctggtgctgctccaaggggcccggggctttgcctaagatccaagacagaataatgaatggactcaaactgccttggcttcaggggagtcccgtcaggacgttgaggacttttcgaccaattcaaccctttgccccacctttattaaaatcttaaac

SEQ ID NO: 178 - protein, 375 aa, Homo sapiens
MERASCLLLLLLPLVHVSATTPEPCELDDEDFRCVCNFSEPQPDWSEAFQCVSAVEVEIHAGGLNLEPFLKRVDADADPRQYADTVKALRVRRLTVGAAQVPAQLLVGALRVLAYSRLKELTLEDLKITGTMPPLPLEATGLALSSLRLRNVSWATGRSWLAELQQWLKPGLKVLSIAQAHSPAFSCEQVRAFPALTSLDLSDNPGLGERGLMAALCPHKFPAIQNLALRNTGMETPTGVCAALAAAGVQPHSLDLSHNSLRATVNPSAPRCMWSSALNSLNLSFAGLEQVPKGLPAKLRVLDLSCNRLNRAPQPDELPEVDNLTLDGNPFLVPGTALPHEGSMNSGVVPACARSTLSVGVSGTLVLLQGARGFA

SEQ ID NO: 179 - DNA, 2633 bp, Homo sapiens
ccgcggcaagaacatccctcccagccagcagattacaatgctgcaaactaaggatctcatctggactttgtttttcctgggaactgcagtttctctgcaggtggatattgttcccagccagggggagatcagcgttggagagtccaaattcttcttatgccaagtggcaggagatgccaaagataaagacatctcctggttctcccccaatggagaaaagctcaccccaaaccagcagcggatctcagtggtgtggaatgatgattcctcctccaccctcaccatctataacgccaacatcgacgacgccggcatttacaagtgtgtggttacaggcgaggatggcagtgagtcagaggccaccgtcaacgtgaagatctttcagaagctcatgttcaagaatgcgccaaccccacaggagttccgggagggggaagatgccgtgattgtgtgtgatgtggtcagctccctcccaccaaccatcatctggaaacacaaaggccgagatgtcatcctgaaaaaagatgtccgattcatagtcctgtccaacaactacctgcagatccggggcatcaagaaaacagatgagggcacttatcgctgtgagggcagaatcctggcacggggggagatcaacttcaaggacattcaggtcattgtgaatgtgccacctaccatccgggccaggcagaatattgtgaatgccaccgccaacctcggccagtccgtcaccctggtgtgcgatgccgaacggttcccagagcccaccatgagctggacaaaggatggggaacagatagagcaagaggaagacgatgagaagtacatcttcagcgacgatagttcccagctgaccatcaaaaaggtggataagaacgacgaggctgagtacatctgcattgctgagaacaaggctggcgagcaggatgcgaccatccacctcaaagtctttgcaaaacccaaaatcacatatgtagagaaccagactgccatggaattagaggagcaggtcactcttacctgtgaagcctccggagaccccattccctccatcacctggaggacttctacccggaacatcagcagcgaagaaaagactctggatgggcacatggtggtgcgtagccatgcccgtgtgtcgtcgctgaccctgaagagcatccagtacactgatgccggagagtacatctgcaccgccagcaacaccatcggccaggactcccagtccatgtaccttgaagtgcaatatgccccaaagctacagggccctgtggctgtgtacacttgggaggggaaccaggtgaacatcacctgcgaggtatttgcctatcccagtgccacgatctcatggtttcgggatggccagctgctgccaagctccaattacagcaatatcaagatctacaacaccccctctgccagctatctggaggtgaccccagactctgagaatgattttgggaactacaactgtactgcagtgaaccgcattgggcaggagtccttcgaattcatccttgttcaagcagacaccccctcttcaccatccatcgaccaggtggagccatactccagcacagcccaggtgcagtttgatgaaccagaggccacaggtggggtgcccatcctcaaatacaaagctgagtggagagcagtgggtgaagaagtatggcattccaagtggtatgatgccaaggaagccagcatggagggcatcgtcaccatcgtgggcctgaagcccgaaacaacgtacgccgtaaggctggcggcgctcaatggcaaagggctgggtgagatcagcgcggcctccgagttcaagacgcagccagtccaaggggaacccagtgcacctaagctcgaagggcagatgggagaggatggaaactctattaaagtgaacctgatcaagcaggatgacggcggctcccccatcagacactatctggtcaggtaccgagcgctctcctccgagtggaaaccagagatcaggctcccgtctggcagtgaccacgtcatgctgaagtccctggactggaatgctgagtatgaggtctacgtggtggctgagaaccagcaaggaaaatccaaggcggctcattttgtgttcaggacctcggcccagcccacagccatcccagccaacggcagccccacctcaggcctgagcaccggggccatcgtgggcatcctcatcgtcatcttcgtcctgctcctggtggttgtggacatcacctgctacttcctgaacaagtgtggcctgttcatgtgcattgcggtcaacctgtgtggaaaagccgggcccggggccaagggcaaggacatggaggagggcaaggccgccttctcgaaagatgagtccaaggagcccatcgtggaggttcgaacggaggaggagaggaccccaaaccatgatggagggaaacacacagagcccaacgagaccacgccactgacggagcccgagaagggccccgtagaagcaaagccagagtgccaggagacagaaacgaagccagcgccagccgaagtcaagacggtccccaatgacgccacacagacaaaggagaacgagagcaaagcatgatgggtgaagagaaccgagcaaagatcaaaataaaaagtgacacagcagc

SEQ ID NO: 180 - protein, 848 aa, Homo sapiens [sequence omitted]

SEQ ID NO: 181 - DNA, 1702 bp, Homo sapiens
agactcaacaagagctccagcaaagactttcactgtagcttgacttgacctgagattaactagggaatcttgagaataaagatgagctctgaaaattgtttcgtagcagagaacagctctttgcatccggagagtggacaagaaaatgatgccaccagtccccatttctcaacacgtcatgaagggtccttccaagttcctgtcctgtgtgctgtaatgaatgtggtcttcatcaccattttaatcatagctctcattgccttatcagtgggccaatacaattgtccaggccaatacacattctcaatgccatcagacagccatgtttcttcatgctctgaggactgggttggctaccagaggaaatgctactttatttctactgtgaagaggagctggacttcagcccaaaatgcttgttctgaacatggtgctactcttgctgtcattgattctgaaaaggacatgaactttctaaaacgatacgcaggtagagaggaacactgggttggactgaaaaaggaacctggtcacccatggaagtggtcaaatggcaaagaatttaacaactggttcaacgttacagggtctgacaagtgtgtttttctgaaaaacacagaggtcagcagcatggaatgtgagaagaatttatactggatatgtaacaaaccttacaaataataaggaaacatgttcacttattgactattatagaatggaactcaaggaaatctgtgtcagtggatgctgctctgtggtccgaagtcttccatagagactttgtgaaaaaaaattttatagtgtcttgggaattttcttccaaacagaactatggaaaaaaaggaagaaattccaggaaaatctgcactgtgggcttttattgccatgagctagaagcatcacaggttgaccaataaccatgcccaagaatgagaagaatgactatgcaacctttggatgcactttatattattttgaatccagaaataatgaaataactaggcgtggacttactatttattgctgaatgactaccaacagtgagagcccttcatgcatttgcactactggaaggagttagatgttggtactagatactgaatgtaaacaaaggaattatggctggtaacataggtttttagtctaattgaatcccttaaactcagggagcatttataaatggacaaatgcttatgaaactaagatttgtaatatttctctctttttagagaaatttgccaatttactttgttatttttccccaaaaagaatgggatgatcgtgtatttatttttttacttcctcagctgtagacaggtccttttcgatggtacatatttctttgcctttataatcttttatacagtgtcttacagagaaaagacataagcaaagactatgaggaatatttgcaagacatagaatagtgttggaaaatgtgcaatatgtgatgtggcaaatctctattaggaaatattctgtaatcttcagacctagaataatactagtcttataataggtttgtgactttcctaaatcaattctattacgtgcaatacttcaatacttcatttaaaatatttttatgtgcaataaaatgtatttgtttgtattttgtgttcagtacaattataagctgtttttatatatgtgaaataaaagtagaataaacacaaaaaaaaaaaaaaaaaaaaaaaaaaaa

SEQ ID NO: 182 - protein, 199 aa, Homo sapiens
MSSENCFVAENSSLHPESGQENDATSPHFSTRHEGSFQVPVLCAVMNVVFITILIIALIALSVGQYNCPGQYTFSMPSDSHVSSCSEDWVGYQRKCYFISTVKRSWTSAQNACSEHGATLAVIDSEKDMNFLKRYAGREEHWVGLKKEPGHPWKWSNGKEFNNWFNVTGSDKCVFLKNTEVSSMECEKNLYWICNKPYK

SEQ ID NO: 183 - DNA, 1642 bp, Homo sapiens
ctctaaaggttcgggggtggaatccttgggccgctgggcaagcggcgagacctggccagggccagcgagccgaggacagagggcgcacggagggccgggccgcagccccggccgcttgcagaccccgccatggacccgttcctggtgctgctgcactcggtgtcgtccagcctgtcgagcagcgagctgaccgagctcaagttcctatgcctcgggcgcgtgggcaagcgcaagctggagcgcgtgcagagcggcctagacctcttctccatgctgctggagcagaacgacctggagcccgggcacaccgagctcctgcgcgagctgctcgcctccctgcggcgccacgacctgctgcggcgcgtcgacgacttcgaggcgggggcggcggccggggccgcgcctggggaagaagacctgtgtgcagcatttaacgtcatatgtgataatgtggggaaagattggagaaggctggctcgtcagctcaaagtctcagacaccaagatcgacagcatcgaggacagatacccccgcaacctgacagagcgtgtgcgggagtcactgagaatctggaagaacacagagaaggagaacgcaacagtggcccacctggtgggggctctcaggtcctgccagatgaacctggtggctgacctggtacaagaggttcagcaggcccgtgacctccagaacaggagtggggccatgtccccgatgtcatggaactcagacgcatctacctccgaagcgtcctgatgggccgctgctttgcgctggtggaccacaggcatctacacagcctggactttggttctctccaggaaggtagcccagcactgtgaagacccagcaggaagccaggctgagtgagccacagaccacctgcttctgaactcaagctgcgtttattaatgcctctcccgcaccaggccgggcttgggccctgcacagatatttccatttcttcctcactatgacactgagcaagatcttgtctccactaaatgagctcctgcgggagtagttggaaagttggaaccgtgtccagcacagaaggaatctgtgcagatgagcagtcacactgttactccacagcggaggagaccagctcagaggcccaggaatcggagcgaagcagagaggtggagaactgggatttgaacccccgccatccttcaccagagcccatgctcaaccactgtggcgttctgctgcccctgcagttggcagaaaggatgttttgtcccatttccttggaggccaccgggacagacctggacactagggtcaggcggggtgctgtggtggggagaggcatggctggggtgggggtggggagacctggttggccgtggtccagctcttggcccctgtgtgagttgagtctcctctctgagactgctaagtaggggcagtgatggttgccaggacgaattgagataatatctgtgaggtgctgatgagtgattgacacacagcactctctaaatcttccttgtgaggattatgggtcctgcaattctacagtttcttactgttttgtatcaaaatcactatctttctgataacagaattgccaaggcagcgggatctcgtatctttaaaaagcagtcctcttattcctaaggtaatcctattaaaa

SEQ ID NO: 184 - protein, 208 aa, Homo sapiens
MDPFLVLLHSVSSSLSSSELTELKFLCLGRVGKRKLERVQSGLDLFSMLLEQNDLEPGHTELLRELLASLRRHDLLRRVDDFEAGAAAGAAPGEEDLCAAFNVICDNVGKDWRRLARQLKVSDTKIDSIEDRYPRNLTERVRESLRIWKNTEKENATVAHLVGALRSCQMNLVADLVQEVQQARDLQNRSGAMSPMSWNSDASTSEAS

SEQ ID NO: 185 - DNA, 1475 bp, Homo sapiens
ggcacgagggagcggagcctggcgggcgtgggaacccaggccccgccgaggcggccaggaggtgagatggcagctgggcaaaatgggcacgaagagtgggtgggcagcgcatacctgtttgtggagtcctcgctggacaaggtggtcctgtcggatgcctacgcgcacccccagcagaaggtggcagtgtacagggctctgcaggctgccttggcagagagcggcgggagcccggacgtgctgcagatgctgaagatccaccgcagcgacccgcagctgatcgtgcagctgcgattctgcgggcggcagccctgtggccgcttcctccgcgcctaccgcgagggggcgctgcgcgccgcgctgcagaggagcctggcggccgcgctcgcccagcactcggtgccgctgcaactggagctgcgcgccggcgccgagcggctggacgctttgctggcggacgaggagcgctgtttgagttgcatcctagcccagcagcccgaccggctccgggatgaagaactggctgagctggaggatgcgctgcgaaatctgaagtgcggctcgggggcccggggtggcgacggggaggtcgcttcggcccccttgcagcccccggtgccctctctgtcggaggtgaagccgccgccgccgccgccacctgcccagacttttctgttccagggtcagcctgtagtgaatcggccgctgagcctgaaggaccaacagacgttcgcgcgctctgtgggtctcaaatggcgcaaggtggggcgctcactgcagcgaggctgccgggcgctgcgggacccggcgctggactcgctggcctacgagtacgagcgcgagggactgtacgagcaggccttccagctgctgcggcgcttcgtgcaggccgagggccgccgcgccacgctgcagcgcctggtggaggcactcgaggagaacgagctcaccagcctggcagaggacttgctgggcctgaccgatcccaatggcggcctggcctagaccaggggtgcagccagcttttggagaacctggatggccttagggttccttctgcggctattgctgaacccctgtccatccacgggaccctgaaactccacttggcctatctgctggacctgctggggcagagttgattgccttccccaggagccagaccactgggggtgcatcattggggattctgcctcaggtactttgatagagtgtggggtgggggggacctgctttggagatcagcctcaccttctcccatcccagaagcggggcttacagccagcccttacagtttcactcatgaagcaccttgatctttggtgtcctggacttcatcctgggtgctgcagatactgcagtgaagtaaaacaggaatcaatcttgcctgcccccagctcacactcagcgtgggaccccgaatgttaagcaatgataataaagtataacacggaaaaaaaaaaaaaaaaaaaaaa

SEQ ID NO: 186 - protein, 312 aa, Homo sapiens
MAAGQNGHEEWVGSAYLFVESSLDKVVLSDAYAHPQQKVAVYRALQAALAESGGSPDVLQMLKIHRSDPQLIVQLRFCGRQPCGRFLRAYREGALRAALQRSLAAALAQHSVPLQLELRAGAERLDALLADEERCLSCILAQQPDRLRDEELAELEDALRNLKCGSGARGGDGEVASAPLQPPVPSLSEVKPPPPPPPAQTFLFQGQPVVNRPLSLKDQQTFARSVGLKWRKVGRSLQRGCRALRDPALDSLAYEYEREGLYEQAFQLLRRFVQAEGRRATLQRLVEALEENELTSLAEDLLGLTDPNGGLA

SEQ ID NO: 187 - DNA, 600 bp, Homo sapiens
atggaagccagagacaagcaggtactccgctccctgcgtctggagctgggtgccgaggtactggtggaaggactggttcttcagtacctttaccaggaaggaattttgacagaaaaccacattcaagaaatcaaagctcaaaccacaggcctccggaagacaatgctgttgctggacatcctgccttccaggggccccaaagcttttgacaccttcctcgattccctccaggaatttccctgggtaagagagaagctggagaaggcgagagaggaagtcacagccgagctgcctacaggtgactggatggccggaatcccctcacacatcctcagcagctcgccatcagaccagcagattaaccagctggctcagaagctaggcccggagtgggagcccgtggtcctgtctctgggactgtcccagaccgacatctaccgctgcaaggccaaccatccccacaacgtgcattcgcaggtggtggaggcctttgtccgctggcgccagcgttttgggaagcaggccaccttcctaagcttacacaagggcctccaggcagtggaggctgatccctccctgctccagcacatgctggagtga

SEQ ID NO: 188 - protein, 199 aa, Homo sapiens [sequence omitted]

SEQ ID NO: 189 - DNA, 1642 bp, Homo sapiens; identical to SEQ ID NO: 183

SEQ ID NO: 190 - protein, 208 aa, Homo sapiens; identical to SEQ ID NO: 184

SEQ ID NO: 191 - DNA, 3492 bp, Homo sapiens
gggagcacatgccggctcagagaatactatgaccagacagctcagatgtgctgcagcaaatgctcgccgggccaacatgcaaaagtcttctgtaccaagacctcggacaccgtgtgtgactcctgtgaggacagcacatacacccagctctggaactgggttcccgagtgcttgagctgtggctcccgctgtagctctgaccaggtggaaactcaagcctgcactcgggaacagaaccgcatctgcacctgcaggcccggctggtactgcgcgctgagcaagcaggaggggtgccggctgtgcgcgccgctgcgcaagtgccgcccgggcttcggcgtggccagaccaggaactgaaacatcagacgtggtgtgcaagccctgtgccccggggacgttctccaacacgacttcatccacggatatttgcaggccccaccagatctgtaacgtggtggccatccctgggaatgcaagcatggatgcagtctgcacgtccacgtcccccacccggagtatggccccaggggcagtacacttaccccagccagtgtccacacgatcccaacacacgcagccaactccagaacccagcactgctccaagcacctccttcctgctcccaatgggccccagccccccagctgaagggagcactggcgacttcgctcttccagttggactgattgtgggtgtgacagccttgggtctactaataataggagtggtgaactgtgtcatcatgacccaggtgaaaaagaagcccttgtgcctgcagagagaagccaaggtgcctcacttgcctgccgataaggcccggggtacacagggccccgagcagcagcacctgctgatcacagcgccgagctccagcagcagctccctggagagctcggccagtgcgttggacagaagggcgcccactcggaaccagccacaggcaccaggcgtggaggccagtggggccggggaggcccgggccagcaccgggagctcagattcttcccctggtggccatgggacccaggtcaatgtcacctgcatcgtgaacgtctgtagcagctctgaccacagctcacagtgctcctcccaagccagctccacaatgggagacacagattccagcccctcggagtccccgaaggacgagcaggtccccttctccaaggaggaatgtgcctttcggtcacagctggagacgccagagaccctgctggggagcaccgaagagaagcccctgccccttggagtgcctgatgctgggatgaagcccagttaaccaggccggtgtgggctgtgtcgtagccaaggtgggctgagccctggcaggatgaccctgcgaaggggccctggtccttccaggcccccaccactaggactctgaggctctttctgggccaagttcctctagtgccctccacagccgcagcctccctctgacctgcaggccaagagcagaggcagcgagttgtggaaagcctctgctgccatggcgtgtccctctcggaaggctggctgggcatggacgttcggggcatgctggggcaagtccctgactctctgtgacctgccccgcccagctgcacctgccagcctggcttctggagcccttgggttttttgtttgtttgtttgtttgtttgtttgtttctccccctgggctctgccccagctctggcttccagaaaaccccagcatccttttctgcagaggggctttctggagaggagggatgctgcctgagtcacccatgaagacaggacagtgcttcagcctgaggctgagactgcgggatggtcctggggctctgtgcagggaggaggtggcagccctgtagggaacggggtccttcaagttagctcaggaggcttggaaagcatcacctcaggccaggtgcagtggctcacgcctatgatcccagcactttgggaggctgaggcgggtggatcacctgaggttaggagttcgagaccagcctggccaacatggtaaaaccccatctctactaaaaatacagaaattagccgggcgtggtggcgggcacctatagtcccagctactcagaagcctgaggctgggaaatcgtttgaacccgggaagcggaggttgcagggagccgagatcacgccactgcactccagcctgggcgacagagcgagagtctgtctcaaaagaaaaaaaaaaagcaccgcctccaaatgctaacttgtccttttgtaccatggtgtgaaagtcagatgcccagagggcccaggcaggccaccatattcagtgctgtggcctgggcaagataacgcacttctaactagaaatctgccaattttttaaaaaagtaagtaccactcaggccaacaagccaacgacaaagccaaactctgccagccacatccaaccccccacctgccatttgcaccctccgccttcactccggtgtgcctgcagccccgcgcctccttccttgctgtcctaggccacaccatctcctttcagggaatttcaggaactagagatgactgagtcctcgtagccatctctctactcctacctcagcctagaccctcctcctcccccagaggggtgggttcctcttccccactccccaccttcaattcctgggccccaaacgggctgccctgccactttggtacatggccagtgtgatcccaagtgccagtcttgtgtctgcgtctgtgttgcgtgtcgtgggtgtgtgtagccaaggtcggtaagttgaatggcctgccttgaagccactgaagctgggattcctccccattagagtcagccttccccctcccagccagggccctgcagaggggaaaccagtgtagccttgcccggattctgggaggaagcaggttgaggggctcctggaaaggctcagtctcaggagcatggggataaaggagaaggcatgaaattgtctagcagagcaggggcagggtgataaattgttgataaattccactggacttgagcttggcagctgaactattggagggtgggagagcccagccattaccatggagacaagaagggttttccaccctggaatcaagatgtcagactggctggctgcagtgacgtgcacctgtactcaggaggctgaggggaggatcactggagcccaggagtttgaggctgcagcgagctatgatcgcgccactacactccagcctgagcaacagagtgagaccctgtctcttaaagaaaaaaaaagtcagactgctgggactggccaggtttctgcccacattggacccacatgaggacatgatggagcgcacctgccccctggtggacagtcctgggagaacctcaggcttccttggcatcacagggcagagccgggaagcgatgaatttggagactctgtggggccttggttcccttgtgtgtgtgtgttgatcccaagacaatgaaagtttgcactgtatgctggacggcattcctgcttatcaataaacctgtttgttttacacgtcgaaaaaaaa

SEQ ID NO: 192 - protein, 425 aa, Homo sapiens
GSTCRLREYYDQTAQMCCSKCSPGQHAKVFCTKTSDTVCDSCEDSTYTQLWNWVPECLSCGSRCSSDQVETQACTREQNRICTCRPGWYCALSKQEGCRLCAPLRKCRPGFGVARPGTETSDVVCKPCAPGTFSNTTSSTDICRPHQICNVVAIPGNASMDAVCTSTSPTRSMAPGAVHLPQPVSTRSQHTQPTPEPSTAPSTSFLLPMGPSPPAEGSTGDFALPVGLIVGVTALGLLIIGVVNCVIMTQVKKKPLCLQREAKVPHLPADKARGTQGPEQQHLLITAPSSSSSSLESSASALDRRAPTRNQPQAPGVEASGAGEARASTGSSDSSPGGHGTQVNVTCIVNVCSSSDHSSQCSSQASSTMGDTDSSPSESPKDEQVPFSKEECAFRSQLETPETLLGSTEEKPLPLGVPDAGMKPS

SEQ ID NO: 193 - DNA, 1799 bp, Homo sapiens
cccacgcgtccgcataaatcagcacgcggccggagaaccccgcaatctctgcgcccacaaaatacaccgacgatgcccgatctactttaagggctgaaacccacgggcctgagagactataagagcgttccctaccgccatggaacaacggggacagaacgccccggccgcttcgggggcccggaaaaggcacggcccaggacccagggaggcgcggggagccaggcctgggctccgggtccccaagacccttgtgctcgttgtcgccgcggtcctgctgttggtctcagctgagtctgctctgatcacccaacaagacctagctccccagcagagagcggccccacaacaaaagaggtccagcccctcagagggattgtgtccacctggacaccatatctcagaagacggtagagattgcatctcctgcaaatatggacaggactatagcactcactggaatgacctccttttctgcttgcgctgcaccaggtgtgattcaggtgaagtggagctaagtccctgcaccacgaccagaaacacagtgtgtcagtgcgaagaaggcaccttccgggaagaagattctcctgagatgtgccggaagtgccgcacagggtgtcccagagggatggtcaaggtcggtgattgtacaccctggagtgacatcgaatgtgtccacaaagaatcaggcatcatcataggagtcacagttgcagccgtagtcttgattgtggctgtgtttgtttgcaagtctttactgtggaagaaagtccttccttacctgaaaggcatctgctcaggtggtggtggggaccctgagcgtgtggacagaagctcacaacgacctggggctgaggacaatgtcctcaatgagatcgtgagtatcttgcagcccacccaggtccctgagcaggaaatggaagtccaggagccagcagagccaacaggtgtcaacatgttgtcccccggggagtcagagcatctgctggaaccggcagaagctgaaaggtctcagaggaggaggctgctggttccagcaaatgaaggtgatcccactgagactctgagacagtgcttcgatgactttgcagacttggtgccctttgactcctgggagccgctcatgaggaagttgggcctcatggacaatgagataaaggtggctaaagctgaggcagcgggccacagggacaccttgtacacgatgctgataaagtgggtcaacaaaaccgggcgagatgcctctgtccacaccctgctggatgccttggagacgctgggagagagacttgccaagcagaagattgaggaccacttgttgagctctggaaagttcatgtatctagaaggtaatgcagactctgccttgtcctaagtgtgattctcttcaggaagtgagaccttccctggtttaccttttttctggaaaaagcccaactggactccagtcagtaggaaagtgccacaattgtcacatgaccggtactggaagaaactctcccatccaacatcacccagtggatggaacatcctgtaacttttcactgcacttggcattatttttataagctgaatgtgataataaggacactatggaaatgtctggatcattccgtttgtgcgtactttgagatttggtttgggatgtcattgttttcacagcacttttttatcctaatgtaaatgctttatttatttatttgggctacattgtaagatccatctacaaaaaaaaaaaaaaaaaaaaaagggcggccgcgactctagagtcgacctgcagaagcttggccgccatggcc

SEQ ID NO: 194 - protein, 411 aa, Homo sapiens [sequence omitted]

SEQ ID NO: 195 - DNA, 683 bp, Homo sapiens
gggctgcaggaattcggcacgagcttagctgaagatgactgacagtgttatttattccatgttagagttgcctacggcaacccaagcccagaatgactatggaccacagcaaaaatcttcctcttccaggccttcttgttcttgccttgtggcaatagctttggggcttctgactgcagttcttctgagtgtgctgctataccagtggatcctgtgccagggctccaactactccacttgtgccagctgtcctagctgcccagaccgctggatgaaatatggtaaccattgttattatttctcagtggaggaaaaggactggaattctagtctggaattctgcctagccagagactcacacctccttgtgataacggacaatcaggaaatgagcctgctccaagttttcctcagtgaggccttttgctggattggtctgaggaacaattctggctggaggtgggaagatggatcacctctaaacttctcaaggatttcttctaatagctttgtgcagacatgcggtgccatcaacaaaaatggtcttcaagcctcaagctgtgaagttcctttacactgggtgtgtaagaaggtcagactttgatagatgaccactctgtcctgaccctcagatctgtcatgtatccctaaaaggagggagctggccactggctgttgggaaa

SEQ ID NO: 196 - protein, 189 aa, Homo sapiens
MTDSVIYSMLELPTATQAQNDYGPQQKSSSSRPSCSCLVAIALGLLTAVLLSVLLYQWILCQGSNYSTCASCPSCPDRWMKYGNHCYYFSVEEKDWNSSLEFCLARDSHLLVITDNQEMSLLQVFLSEAFCWIGLRNNSGWRWEDGSPLNFSRISSNSFVQTCGAINKNGLQASSCEVPLHWVCKKVRL

SEQ ID NO: 197 - DNA, 2967 bp, Homo sapiens
tagctccgcgcgggggcttcctcggctccttgctgttgccgccgccgcagctgctgccgcggttggtggggttgggtgagaggaggagctgtcgcggaccctgtagagtcggtctctgttgctctttttgcctgaggagtcttccatcctacgtcgagctctgactcccgtgctgtcgagagggagtccccggggacacctcggcacgcagcggagatgcctctttttgccaccaatcccttcgatcaggatgttgagaaagcaaccagcgagatgaatactgctgaggactggggcctcattttggatatctgtgataaagttggtcagtctcgcactggacctaaggattgtcttcggtctattatgagaagagtgaaccacaaagatcctcacgttgctatgcaggctttgactcttctaggagcatgtgtatcaaactgtggcaaaatttttcatttagaagtatgttcaagagattttgctagtgaagtaagcaacgtattaaataagggtcatcctaaagtatgtgaaaaattaaaggctcttatggttgaatggacagatgaatttaagaatgatccacagcttagtctaatatcagcaatgattaagaaccttaaggaacaaggagttacgttcccagctattggctctcaggctgcagaacaagcaaaagcaagcccagctcttgtagccaaggatcctggtactgtggctaacaaaaaagaagaagaagatttagcaaaagccattgagttgtctctcaaggaacaaaggcagcagtcaaccaccctttccactttgtatccaagcacatccagtctcttaactaaccaccaacatgaaggccgaaaagttcgtgctatatatgactttgaagctgctgaagacaatgaacttacttttaaagctggagaaattattacagttcttgatgacagtgatcctaactggtggaaaggtgaaacccatcaaggcatagggttatttccttctaattttgtgactgcagatctcactgctgaaccagaaatgattaaaacagagaagaagacggtacaatttagtgatgatgttcaggtagagacaatagaaccagagccggaaccagcctttattgatgaagataaaatggaccagttgctacagatgctgcaaagtacagaccccagtgatgatcagccagacctaccagagctgcttcatcttgaagcaatgtgtcaccagatgggacctctcattgatgaaaagctggaagatattgatagaaaacattcagaactctcagaacttaatgtgaaagtgatggaggccctttccttatataccaagttaatgaacgaagatccgatgtattccatgtatgcaaagttacagaatcagccatattatatgcagtcatctggtgtttctggttctcaggtgtatgcagggcctcctccaagtggtgcctacctggttgcagggaacgcgcagatgagccacctccagagctacagtcttcccccggagcagctgtcttctctcagccaggcagtggtcccaccatccgcaaacccagcccttcctagtcagcagactcaggccgcttacccaaatacaatggtcagttccgttcaaggaaacacatatcccagccaggcgccagtatatagtcctcctcctgccgctactgctgctgctgcaactgccgatgtcactctgtaccagaatgcaggacctaatatgccccaggtgccaaactataacttaacatcatcaactctgcctcagcccggaggcagccaacagccacctcagccacagcaaccatattctcagaaggctctgctataggacccggtgttcctcttggtggcagatacctgctaaatgccactgacaatgttatgagattcattactatcttaagatgtgtttatcctcagcttataggaatctctccaggtcaacaggttcaaatattcaagaaggtagaactctcctcaatttacactgactttttagaggttcttccccccccgcccctgcagaggaatgaaactacttacaacatttaattcctttcataatatgaaagaattgatacaaggctatttgtctcgtaaacctggtctgcagaaagtcaaacttacaaaaactgttgtgacaaatgttatgtacatatattgatatgtaactgcattagtggccattttgaatcacagtggtgatcgtgtgaatatatttaacactgtgttaaattaatttacgttgctattttattttaatcataaacaactaccatgtttcttaatgttttgtgtaaatttaaggtaattatactatccttttaaacttcaagaaaacaaagttgttagcgtatttacatgaaggcgcattatgttgtcgtgtgtttcagtttcacattaaactgaaccttttactaattgtgagctaaagagatatatatatatatgtgtgtgtatatatatatatctacatgtctttctgtagcctctgcatactactggctgtcatcacaccagcgtacagtagctaaatttttggtgcaattatagcaaatgataatgttcccttttgaacttttacattttggcatgacatttcagagtattgtgggaccatgagacaaaattaagtacgatcacattctttatttctcattttaaagaaatgatgttggtttaccttttcctagttgaagatagtaattaggtttctaagctgtatactgtgtttattggtggcagtgacaccaaagatagaggcaatggatagaaatttttaaactggaaagaaaacctgaattacactacattttcgaagtctcttgtaattatttgggatatcaacaaaatttgattcgtctgtctaatcccttgctagtattttaaatatgtctttaacacattgtatcctttaattcttcattaaaatggaaataagtagatgtttcaaagt

SEQ ID NO: 198 - protein, 540 aa, Homo sapiens
MPLFATNPFDQDVEKATSEMNTAEDWGLILDICDKVGQSRTGPKDCLRSIMRRVNHKDPHVAMQALTLLGACVSNCGKIFHLEVCSRDFASEVSNVLNKGHPKVCEKLKALMVEWTDEFKNDPQLSLISAMIKNLKEQGVTFPAIGSQAAEQAKASPALVAKDPGTVANKKEEEDLAKAIELSLKEQRQQSTTLSTLYPSTSSLLTNHQHEGRKVRAIYDFEAAEDNELTFKAGEIITVLDDSDPNWWKGETHQGIGLFPSNFVTADLTAEPEMIKTEKKTVQFSDDVQVETIEPEPEPAFIDEDKMDQLLQMLQSTDPSDDQPDLPELLHLEAMCHQMGPLIDEKLEDIDRKHSELSELNVKVMEALSLYTKLMNEDPMYSMYAKLQNQPYYMQSSGVSGSQVYAGPPPSGAYLVAGNAQMSHLQSYSLPPEQLSSLSQAVVPPSANPALPSQQTQAAYPNTMVSSVQGNTYPSQAPVYSPPPAATAAAATADVTLYQNAGPNMPQVPNYNLTSSTLPQPGGSQQPPQPQQPYSQKALL

SEQ ID NO: 199 - DNA, 2531 bp, Homo sapiens
tctaagtagtatcttggaaattcagagagatactcatcctacctgaatataaactgagataaatccagtaaagaaagtgtagtaaattctacataagagtctatcattgatttcttttggtggtaaaaatcttagttcatgtgaagaaatttcatgtgaatgttttagctatcaaacagcactgtcacctactcatgcacaaaactgcctcccaaagacttttcccaggtccctcgtatcaaaacattaagagtataatggaagatagcacgatcttgtcagattggacaaacagcaacaaacaaaaaatgaagtatgacttttcctgtgaactctacagaatgtctacatattcaactttccccgccggggtgcctgtctcagaaaggagtcttgctcgtgctggtttttattatactggtgtgaatgacaaggtcaaatgcttctgttgtggcctgatgctggataactggaaactaggagacagtcctattcaaaagcataaacagctatatcctagctgtagctttattcagaatctggtttcagctagtctgggatccacctctaagaatacgtctccaatgagaaacagttttgcacattcattatctcccaccttggaacatagtagcttgttcagtggttcttactccagcctttctccaaaccctcttaattctagagcagttgaagacatctcttcatcgaggactaacccctacagttatgcaatgagtactgaagaagccagatttcttacctaccatatgtggccattaacttttttgtcaccatcagaattggcaagagctggtttttattatataggacctggagatagggtagcctgctttgcctgtggtgggaagctcagtaactgggaaccaaaggatgatgctatgtcagaacaccggaggcattttcccaactgtccatttttggaaaattctctagaaactctgaggtttagcatttcaaatctgagcatgcagacacatgcagctcgaatgagaacatttatgtactggccatctagtgttccagttcagcctgagcagcttgcaagtgctggtttttattatgtgggtcgcaatgatgatgtcaaatgcttttgttgtgatggtggcttgaggtgttgggaatctggagatgatccatgggtagaacatgccaagtggtttccaaggtgtgagttcttgatacgaatgaaaggccaagagtttgttgatgagattcaaggtagatatcctcatcttcttgaacagctgttgtcaacttcagataccactggagaagaaaatgctgacccaccaattattcattttggacctggagaaagttcttcagaagatgctgtcatgatgaatacacctgtggttaaatctgccttggaaatgggctttaatagagacctggtgaaacaaacagttcaaagtaaaatcctgacaactggagagaactataaaacagttaatgatattgtgtcagcacttctaaatgctgaagatgaaaaaagagaggaggagaaggaaaaacaagctgaagaaatggcatcagatgatttgtcattaattcggaagaacagaatggctctctttcaacaattgacatgtgtgcttcctatcctggataatcttttaaaggccaatgtaattaataaacaggaacatgatattattaaacaaaaaacacagatacctttacaagcgagagaactgattgataccattttggttaaaggaaatgctgcggccaacatcttcaaaaactgtctaaaagaaattgactctacattgtataagaacttatttgtggataagaatatgaagtatattccaacagaagatgtttcaggtctgtcactggaagaacaattgaggaggttgcaagaagaacgaacttgtaaagtgtgtatggacaaagaagtttctgttgtatttattccttgtggtcatctggtagtatgccaggaatgtgccccttctctaagaaaatgccctatttgcaggggtataatcaagggtactgttcgtacatttctctcttaaagaaaaatagtctatattttaacctgcataaaaaggtctttaaaatattgttgaacacttgaagccatctaaagtaaaaagggaattatgagtttttcaattagtaacattcatgttctagtctgctttggtactaataatcttgtttctgaaaagatggtatcatatatttaatcttaatctgtttatttacaagggaagatttatgtttggtgaactatattagtatgtatgtgtacctaagggagtagtgtcactgcttgttatgcatcatttcaggagttactggatttgttgttctttcagaaagctttgaatactaaattatagtgtagaaaagaactggaaaccaggaactctggagttcatcagagttatggtgccgaattgtctttggtgcttttcacttgtgttttaaaataaggatttttctcttatttctccccctagtttgtgagaaacatctcaataaagtgcttt

SEQ ID NO: 200 - protein, 618 aa, Homo sapiens
MHKTASQRLFPGPSYQNIKSIMEDSTILSDWTNSNKQKMKYDFSCELYRMSTYSTFPAGVPVSERSLARAGFYYTGVNDKVKCFCCGLMLDNWKLGDSPIQKHKQLYPSCSFIQNLVSASLGSTSKNTSPMRNSFAHSLSPTLEHSSLFSGSYSSLSPNPLNSRAVEDISSSRTNPYSYAMSTEEARFLTYHMWPLTFLSPSELARAGFYYIGPGDRVACFACGGKLSNWEPKDDAMSEHRRHFPNCPFLENSLETLRFSISNLSMQTHAARMRTFMYWPSSVPVQPEQLASAGFYYVGRNDDVKCFCCDGGLRCWESGDDPWVEHAKWFPRCEFLIRMKGQEFVDEIQGRYPHLLEQLLSTSDTTGEENADPPIIHFGPGESSSEDAVMMNTPVVKSALEMGFNRDLVKQTVQSKILTTGENYKTVNDIVSALLNAEDEKREEEKEKQAEEMASDDLSLIRKNRMALFQQLTCVLPILDNLLKANVINKQEHDIIKQKTQIPLQARELIDTILVKGNAAANIFKNCLKEIDSTLYKNLFVDKNMKYIPTEDVSGLSLEEQLRRLQEERTCKVCMDKEVSVVFIPCGHLVVCQECAPSLRKCPICRGIIKGTVRTFLS

SEQ ID NO: 201 - DNA, 2477 bp, Homo sapiens
agtgcagacgcggctcctagcggatgggtgctattgtgaggcggttgtagaagttaataaaggtatccatggagaacactgaaaactcagtggattcaaaatccattaaaaatttggaaccaaagatcatacatggaagcgaatcaatggactctggaatatccctggacaacagttataaaatggattatcctgagatgggtttatgtataataattaataataagaattttcataaaagcactggaatgacatctcggtctggtacagatgtcgatgcagcaaacctcagggaaacattcagaaacttgaaatatgaagtcaggaataaaaatgatcttacacgtgaagaaattgtggaattgatgcgtgatgtttctaaagaagatcacagcaaaaggagcagttttgtttgtgtgcttctgagccatggtgaagaaggaataatttttggaacaaatggacctgttgacctgaaaaaaataacaaactttttcagaggggatcgttgtagaagtctaactggaaaacccaaacttttcattattcaggcctgccgtggtacagaactggactgtggcattgagacagacagtggtgttgatgatgacatggcgtgtcataaaataccagtggaggccgacttcttgtatgcatactccacagcacctggttattattcttggcgaaattcaaaggatggctcctggttcatccagtcgctttgtgccatgctgaaacagtatgccgacaagcttgaatttatgcacattcttacccgggttaaccgaaaggtggcaacagaatttgagtccttttcctttgacgctacttttcatgcaaagaaacagattccatgtattgtttccatgctcacaaaagaactctatttttatcactaaagaaatggttggttggtggttttttttagtttgtatgccaagtgagaagatggtatatttggtactgtatttccctctcattttgacctactctcatgctgcagagggtactttaagacatactccttccatcaaatagaaccactatgaagctacctcaaacttccagtcaggtagttgcaattgaattaaattaggaataaataaaaatggatactggtgcagtcattatgagaggcaatgattgttaatttacagctttcatgattagcaagttacagtgatgctgtgctatgaattttcaagtaattgtgaaaaagttaaacattgaagtaatgaatttttatgatattccccccacttaagactgtgtattctagttttgtcaaactgtagaaatgatgatgtggaagaacttaggcatctgtgggcatggtcaaaggctcaaacctttattttagaattgatatacacggatgacttaactgcatttttagaccatttatctgggattatggttttgtgatgtttgtcctgaacacttttgttgtaaaaaaataataataatgtttaatattgagaaagaaactaatattttatgtgagagaaagtgtgagcaaactaacttgacttttaaggctaaaacttaacattcatagaggggtggagttttaactgtaaggtgctacaatgcccctggatctaccagcataaatatcttctgatttgtccctatgcatatcagttgagcttcatataccagcaatatatctgaagagctattatataaaaaccccaaactgttgattattagccaggtaatgtgaataaattctataggaacatatgaaaatacaacttaaataataaacagtggaatataaggaaagcaataaatgaatgggctgagctgcctgtaacttgagagtagatggtttgagcctgagcagagacatgactcagcctgttccatgaaggcagagccatggaccacgcaggaagggcctacagcccatttctccatacgcactggtatgtgtggatgatgctgccagggcgccatcgccaagtaagaaagtgaagcaaatcagaaacttgtgaagtggaaatgttctaaaggtggtgaggcaataaaaatcatagtactctttgtagcaaaattcttaagtatgttattttctgttgaagtttacaatcaaaggaaaatagtaatgttttatactgtttactgaaagaaaaagacctatgagcacataggactctagacggcatccagccggaggccagagctgagccctcagcccgggaggcaggctccaggcctcagcaggtgcggagccgtcactgcaccaagtctcactggctgtcagtatgacatttcacgggagatttcttgttgctcaaaaaatgagctcgcatttgtcaatgacagtttcttttttcttactagacctgtaacttttgtaaatacacatagcatgtaatggtatcttaaagtgtgtttctatgtgacaattttgtacaaatttgttattttccatttttatttcaaaatatacattcaaacttaaaatt

SEQ ID NO: 202 - protein, 277 aa, Homo sapiens
MENTENSVDSKSIKNLEPKIIHGSESMDSGISLDNSYKMDYPEMGLCIIINNKNFHKSTGMTSRSGTDVDAANLRETFRNLKYEVRNKNDLTREEIVELMRDVSKEDHSKRSSFVCVLLSHGEEGIIFGTNGPVDLKKITNFFRGDRCRSLTGKPKLFIIQACRGTELDCGIETDSGVDDDMACHKIPVEADFLYAYSTAPGYYSWRNSKDGSWFIQSLCAMLKQYADKLEFMHILTRVNRKVATEFESFSFDATFHAKKQIPCIVSMLTKELYFYH

SEQ ID NO: 203 - DNA, 1906 bp, Homo sapiens
agaggaaagggaaggaggaggtcccgaatagcggtcgccgaaatgttccggtgtggaggcctggcggcgggtgctttgaagcagaagctggtgcccttggtgcggaccgtgtgcgtccgaagcccgaggcagaggaaccggctcccaggcaacttgttccagcgatggcatgttcctctagaactccagatgacaagacaaatggctagctctggtgcatcagggggcaaaatcgataattctgtgttagtccttattgtgggcttatcaacagtaggagctggtgcctatgcctacaagactatgaaagaggacgaaaaaagatacaatgaaagaatttcagggttagggctgacaccagaacagaaacagaaaaaggccgcgttatctgcttcagaaggagaggaagttcctcaagacaaggcgccaagtcatgttcctttcctgctaattggtggaggcacagctgcttttgctgcagccagatccatccgggctcgggatcctggggccagggtactgattgtatctgaagatcctgagctgccgtacatgcgacctcctctttcaaaagaactgtggttttcagatgacccaaatgtcacaaagacactgcgattcaaacagtggaatggaaaagagagaagcatatatttccagccaccttctttctatgtctctgctcaggacctgcctcatattgagaatggtggtgtggctgtcctcactgggaagaaggtagtacagctggatgtgagagacaacatggtgaaacttaatgatggctctcaaataacctatgaaaagtgcttgattgcaacaggaggtactccaagaagtctgtctgccattgatagggctggagcagaggtgaagagtagaacaacgcttttcagaaagattggagactttagaagcttggagaagatttcacgggaagtcaaatcaattacgattatcggtgggggcttccttggtagcgaactggcctgtgctcttggcagaaaggctcgagccttgggcacagaagtgattcaactcttccccgagaaaggaaatatgggaaagatcctccccgaatacctcagcaactggaccatggaaaaagtcagacgagagggggttaaggtgatgcccaatgctattgtgcaatccgttggagtcagcagtggcaagttacttatcaagctgaaagacggcaggaaggtagaaactgaccacatagtggcagctgtgggcctggagcccaatgttgagttggccaagactggtggcctggaaatagactcagattttggtggcttccgggtaaatgcagagctacaagcacgctctaacatctgggtggcaggagatgctgcatgcttctacgatataaagttgggaaggaggcgggtagagcaccatgatcacgctgttgtgagtggaagattggctggagaaaatatgactggagctgctaagccgtactggcatcagtcaatgttctggagtgatttgggccccgatgttggctatgaagctattggtcttgtggacagtagtttgcccacagttggtgtttttgcaaaagcaactgcacaagacaaccccaaatctgccacagagcagtcaggaactggtatccgatcagagagtgagacagagtccgaggcctcagaaattactattcctcccagcaccccggcagttccacaggctcccgtccagggggaggactacggcaaaggtgtcatcttctacctcagggacaaagtggtcgtggggattgtgctatggaacatctttaaccgaatgccaatagcaaggaagatcattaaggacggtgagcagcatgaagatctcaatgaagtagccaaactattcaacattcatgaagactgaagccccacagtggaattggcaa

SEQ ID NO: 204 - protein, 613 aa, Homo sapiens
MFRCGGLAAGALKQKLVPLVRTVCVRSPRQRNRLPGNLFQRWHVPLELQMTRQMASSGASGGKIDNSVLVLIVGLSTVGAGAYAYKTMKEDEKRYNERISGLGLTPEQKQKKAALSASEGEEVPQDKAPSHVPFLLIGGGTAAFAAARSIRARDPGARVLIVSEDPELPYMRPPLSKELWFSDDPNVTKTLRFKQWNGKERSIYFQPPSFYVSAQDLPHIENGGVAVLTGKKVVQLDVRDNMVKLNDGSQITYEKCLIATGGTPRSLSAIDRAGAEVKSRTTLFRKIGDFRSLEKISREVKSITIIGGGFLGSELACALGRKARALGTEVIQLFPEKGNMGKILPEYLSNWTMEKVRREGVKVMPNAIVQSVGVSSGKLLIKLKDGRKVETDHIVAAVGLEPNVELAKTGGLEIDSDFGGFRVNAELQARSNIWVAGDAACFYDIKLGRRRVEHHDHAVVSGRLAGENMTGAAKPYWHQSMFWSDLGPDVGYEAIGLVDSSLPTVGVFAKATAQDNPKSATEQSGTGIRSESETESEASEITIPPSTPAVPQAPVQGEDYGKGVIFYLRDKVVVGIVLWNIFNRMPIARKIIKDGEQHEDLNEVAKLFNIHED

SEQ ID NO: 205 - DNA, 1090 bp, Homo sapiens
atggccgctgacaggggacgcaggatattgggagtgtgtggcatgcatcctcatcatcaggaaactctaaaaaagaaccgagtggtgctagccaaacagctgttgttgagcgaattgttagaacatcttctggagaaggacatcatcaccttggaaatgagggagctcatccaggccaaagtgggcagtttcagccagaatgtggaactcctcaacttgctgcctaagaggggtccccaagcttttgatgccttctgtgaagccttgcactcctgaattttatcaaacacacttccagctggcatataggttgcagtctcggcctcgtggcctagcactggtgttgagcaatgtgcacttcactggagagaaagaactggaatttcgctctggaggggatgtggaccacagtactctagtcaccctcttcaagcttttgggctatgacgtccatgttctatgtgaccagactgcacaggaaatgcaagagaaactgcagaattttgcacagttacctgcacaccgagtcacggactgctgcatcgtggcactcctctcgcatggtgtggagggcgccatctatggtgtggatgggaaactgctccagctccaagaggtttttcagctctttgacaacgccaaccgcccaagcctacagaacaaaccaaaaatgttcttcatccaggcctgccgtggagatgagactaatcgtggggttgaccaacaagatggaaagaaccacgcaggatcccctgggtgcgaggagagtgatgccggtaaagaaaagttgccgaagatgagactgcccacgcgctcagacatgatatgcggctatgcctgcctcaaagggactgccgccatgcggaacaccaaacgaggttcctggtacatcgaggctcttgctcaagtgttttctgagcgggcttgtgatatgcacgtggccgacatgctggttaaggtgaacgcacttatcaaggatcgggaaggttatgctcctggcacagaattccaccggtgcaaggagatgtctgaatactgcagcactctgtgccgccacctctacctgttcccaggacaccctcccacatga

SEQ ID NO: 206 - protein, 91 aa, Homo sapiens
MAADRGRRILGVCGMHPHHQETLKKNRVVLAKQLLLSELLEHLLEKDIITLEMRELIQAKVGSFSQNVELLNLLPKRGPQAFDAFCEALHS

SEQ ID NO: 207 - DNA, 714 bp, Artificial Sequence
  Fusion polynucleotide
tctgatcaggagcccaaatcttgtgacaaaactcacacatgcccaccgtgcccagcacctgaactcctggggggaccgtcagtcttcctcttccccccaaaacccaaggacaccctcatgatctcccggacccctgaggtcacatgcgtggtggtggacgtgagccacgaagaccctgaggtcaagttcaactggtacgtggacggcgtggaggtgcataatgccaagacaaagccgcgggaggagcagtacaacagcacgtaccgtgtggtcagcgtcctcaccgtcctgcaccaggactggctgaatggcaaggagtacaagtgcaaggtctccaacaaagccctcccagcccccatcgagaaaacaatctccaaagccaaagggcagccccgagaaccacaggtgtacaccctgcccccatcccgggatgagctgaccaagaaccaggtcagcctgacctgcctggtcaaaggcttctatcccagcgacatcgccgtggagtgggagagcaatgggcagccggagaacaactacaagaccacgcctcccgtgctggactccgacggctccttcttcctctacagcaagctcaccgtggacaagagcaggtggcagcaggggaacgtcttctcatgctccgtgatgcatgaggctctgcacaaccactacacgcagaagagcctctccctgtctccgggtaaatgatctaga

SEQ ID NO: 208 - protein, 235 aa, Artificial Sequence
  Fusion polypeptide
SDQEPKSCDKTHTCPPCPAPELLGGPSVFLFPPKPKDTLMISRTPEVTCVVVDVSHEDPEVKFNWYVDGVEVHNAKTKPREEQYNSTYRVVSVLTVLHQDWLNGKEYKCKVSNKALPAPIEKTISKAKGQPREPQVYTLPPSRDELTKNQVSLTCLVKGFYPSDIAVEWESNGQPENNYKTTPPVLDSDGSFFLYSKLTVDKSRWQQGNVFSCSVMHEALHNHYTQKSLSLSPGK

SEQ ID NO: 209 - DNA, 718 bp, Artificial Sequence
  Fusion polynucleotide
  misc_feature 34, 43, 52, 55, 58, 64: n = A,T,C or G
tgatcaagaaccacatggaggatgcacgtgcccncagtgcccncaatgcccngcnccngaactnccaggaggcccttctgtctttgtcttccccccgaaacccaaggacgtcctctccatttttggaggccgagtcacgtgcgttgtagtggacgtcggaaagaaagaccccgaggtcaatttcaactggtatattgatggcgttgaggtgcgaacggccaatacgaagccaaaagaggaacagttcaacagcacgtaccgcgtggtcagcgtcctgcccatccagcaccaggactggctgacggggaaggaattcaagtgcaaggtcaacaacaaagctctcccggcccccatcgagaggaccatctccaaggccaaagggcagacccgggagccgcaggtgtacaccctggccccacaccgggaagaactggccaaggacaccgtgagcgtaacatgcctggtcaaaggcttctacccagctgacatcaacgttgagtggcagaggaacggtcagccggagtcagagggcacctacgccaacacgccgccacagctggacaacgacgggacctacttcctctacagcaagctctcggtgggaaagaacacgtggcagcggggagaaaccttaacctgtgtggtgatgcatgaggccctgcacaaccactacacccagaaatccatcacccagtcttcgggtaaatagtaatctaga

SEQ ID NO: 210 - DNA, 757 bp, Artificial Sequence
  Fusion polynucleotide
tgatcaagaacccaagacaccaaaaccacaaccacaaccacaaccacaacccaatcctacaacagaatccaagtgtcccaaatgtccagcccctgagctcctgggagggccctcagtcttcatcttccccccgaaacccaaggacgtcctctccatttctgggaggcccgaggtcacgtgcgttgtggtagacgtgggccaggaagaccccgaggtcagtttcaactggtacattgatggcgctgaggtgcgaacggccaacacgaggccaaaagaggaacagttcaacagcacgtaccgcgtggtcagcgtcctgcccatccagcaccaggactggctgacggggaaggaattcaagtgcaaggtcaacaacaaagctctcccggcccccatcgagaagaccatctccaaggccaaagggcagacccgggagccgcaggtgtacaccctggccccacaccgggaagagctggccaaggacaccgtgagcgtaacatgcctggtcaaaggcttctacccacctgatatcaacgttgagtggcagaggaatgggcagccggagtcagagggcacytacgccaccacgccaccccagctggacaacgacgggacctacttcctctacagcaagctctcggtgggaaagaacacgtggcagcagggagaaaccttcacctgtgtggtgatgcacgaggccctgcacaaccactacacccagaaatccatcacccagtcttcgggtaaatagtaatctaga

SEQ ID NO: 211 - DNA, 727 bp, Artificial Sequence
  Fusion polynucleotide
tgatcaagcgcaccacagcgaagaccccagctccaagtgtcccaaatgcccaggccctgaactccttggagggcccacggtcttcatcttccccccgaaagccaaggacgtcctctccatcacccgaaaacctgaggtcacgtgcttgtggtggacgtgggtaaagaagaccctgagatcgagttcaagctggtccgtggatgacacagaggtacacacggctgagacaaagccaaaggaggaacagttcaacagcacgtaccgcgtggtcagcgtcctgcccatccagcaccaggactggctgacggggaaggaattcaagtgcaaggtcaacaacaaagctctcccagcccccatcgagaggaccatctccaaggccaaagggcagacccgggagccgcaggtgtacaccctggccccacaccgggaagagctggccaaggacaccgtgagcgtaacctgcctggtcaaaggcttcttcccagctgacatcaacgttgagtggcagaggaatgggcagccggagtcagagggcacctacgccaacacgccgccacagctggacaacgacgggacctacttcctctacagcaaactctccgtgggaaagaacacgtggcagcagggagaagtcttcacctgtgtggtgatgcacgaggctctacacaatcactccacccagaaatccatcacccagtcttcgggtaaatagtaatctagagggccc

SEQ ID NO: 212 - protein, 231 aa, Artificial Sequence
  Fusion polypeptide
EPHGGCTCPQCPAPELPGGPSVFVFPPKPKDVLSISGRPEVTCVVVDVGKEDPEVNFNWYIDGVEVRTANTKPKEEQFNSTYRVVSVLPIQHQDWLTGKEFKCKVNNKALPAPIERTISKAKGQTREPQVYTLAPHREELAKDTVSVTCLVKGFYPADINVEWQRNGQPESEGTYANTPPQLDNDGTYFLYSRLSVGKNTWQRGETLTGVVMHEALHNHYTQKSITQSSGK

SEQ ID NO: 213 - protein, 248 aa, Artificial Sequence
  Fusion polypeptide
DQEPKTPKPQPQPQPQPNPTTESKCPKCPAPELLGGPSVFIFPPKPKDVLSISGRPEVTCVVVDVGQEDPEVSFNWYIDGAEVRTANTRPKEEQFNSTYRVVSVLPIQHQDWLTGKEFKCKVNNKALPAPIEKTISKAKGQTREPQVYTLAPHREELAKDTVSVTCLVKGFYPPDINVEWQRNGQPESEGTYATTPPQLDNDGTYFLYSKLSVGKNTWQQGETFTCVVMHEALHNHYTQKSITQSSGK

SEQ ID NO: 214 - protein, 236 aa, Artificial Sequence
  Fusion polypeptide
DQAHHSEDPSSKCPKCPGPELLGGPTVFIFPPKAKDVLSITRKPEVTCLWWTWVKKTLRSSSSWSVDDTEVHTAETKPKEEQFNSTYRVVSVLPIQHQDWLTGKEFKCKVNNKALPAPIERTISKAKGQTREPQVYTLAPHREELAKDTVSVTCLVKGFFPADINVEWQRNGQPESEGTYANTPPQLDNDGTYFLYSKLSVGKNTWQQGEVFTCVVMHEALHNHSTQKSITQSSGK

SEQ ID NO: 215 - DNA, 54 bp, Artificial Sequence
  Fusion polynucleotide
gatcaggagcccaaatcttgtgacaaaactcacacatgcccaccgtgcccagca

SEQ ID NO: 216 - protein, 18 aa, Artificial Sequence
  Fusion polypeptide
DQEPKSCDKTHTCPPCPA

SEQ ID NO: 217 - DNA, 54 bp, Artificial Sequence
  Fusion polynucleotide
gatctggagcccaaatcttgtgacaaaactcacacatgcccaccgtgcccagca

SEQ ID NO: 218 - protein, 18 aa, Artificial Sequence
  Fusion polypeptide
DLEPKSCDKTHTCPPCPA

SEQ ID NO: 219 - DNA, 327 bp, Artificial Sequence
  Fusion polynucleotide
cctgaactcctggggggaccgtcagtcttcctcttccccccaaaacccaaggacaccctcatgatctcccggacccctgaggtcacatgcgtggtggtggacgtgagccacgaagaccctgaggtcaagttcaactggtacgtggacggcgtggaggtgcataatgccaagacaaagccgcgggaggagcagtacaacagcacgtaccgtgtggtcagcgtcctcaccgtcctgcaccaggactggctgaatggcaaggagtacaagtgcaaggtctccaacaaagccctcccagcccccatcgagaaaaccatctccaaagccaaa

SEQ ID NO: 220 - protein, 109 aa, Artificial Sequence
  Fusion polypeptide
PELLGGPSVFLFPPKPKDTLMISRTPEVTCVVVDVSHEDPEVKFNWYVDGVEVHNAKTKPREEQYNSTYRVVSVLTVLHQDWLNGKEYKCKVSNKALPAPIEKTISKAK

SEQ ID NO: 221 - DNA, 324 bp, Artificial Sequence
  Fusion polynucleotide
gggcagccccgagaaccacaggtgtacaccctgcccccatcccgggaggagatgaccaagaaccaggtcagcctgacctgcctggtcaaaggcttctatcccagcgacatcgccgtggagtgggagagcaatgggcagccggagaacaactacaagaccacgcctcccgtgctggactccgacggctccttcttcctctatagcaagctcaccgtggacaagagcaggtggcagcaggggaacgtcttctcatgctccgtgatgcatgaggctctgcacaaccactacacgcagaagagcctctccctgtccccgggtaaatga

SEQ ID NO: 222 - protein, 107 aa, Artificial Sequence
  Fusion polypeptide
GQPREPQVYTLPPSREEMTKNQVSLTCLVKGFYPSDIAVEWESNGQPENNYKTTPPVLDSDGSFFLYSKLTVDKSRWQQGNVFSCSVMHEALHNHYTQKSLSLSPGK

SEQ ID NO: 223 - DNA, 54 bp, Artificial Sequence
  Fusion polynucleotide
gatcaggagcccaaatcttctgacaaaactcacacatccccaccgtccccagca

SEQ ID NO: 224 - protein, 18 aa, Artificial Sequence
  Fusion polypeptide
DQEPKSSDKTHTSPPSPA

SEQ ID NO: 225 - DNA, 712 bp, Artificial Sequence
  Fusion polynucleotide
tgatcaccccaaatcttctgacaaaactcacacatctccaccgtcctcagcacctgaactcctgggtggaccgtcagtcttcctcttccccccaaaacccaaggacaccctcatgatctcccggacccctgaggtcacatgcgtggtggtggacgtgagccacgaagaccctgaggtcaagttcaactggtacgtggacggcgtggaggtgcataatgccaagacaaagccgcgggaggagcagtacaacagcacgtaccgtgtggtcagcgtcctcaccgtcctgcaccaggactggctgaatggcaaggagtacaagtgcaaggtctccaacaaagccctcccagcccccatcgagaaaacaatctccaaagccaaagggcagccccgagaaccacaggtgtacaccctgcccccatcccgggatgagctgaccaagaaccaggtcagcctgacctgcctggtcaaaggcttctatcccagcgacatcgccgtggagtgggagagcaatgggcagccggagaacaactacaagaccacgcctcccgtgctggactccgacggctccttcttcctctacagcaagctcaccgtggacaagagcaggtggcagcaggggaacgtcttctcatgctccgtgatgcatgaggctctgcacaaccactacacgcagaagagcctctccctgtctccgggtaaatgataatctaga

SEQ ID NO: 226 - protein, 233 aa, Artificial Sequence
  Fusion polypeptide
DHPKSSDKTHTSPPSSAPELLGGPSVFLFPPKPKDTLMISRTPEVTCVVVDVSHEDPEVKFNWYVDGVEVHNAKTKPREEQYNSTYRVVSVLTVLHQDWLNGKEYKCKVSNKALPAPIEKTISKAKGQPREPQVYTLPPSRDELTKNQVSLTCLVKGFYPSDIAVEWESNGQPENNYKTTPPVLDSDGSFFLYSKLTVDKSRWQQGNVFSCSVMHEALHNHYTQKSLSLSPGK

SEQ ID NO: 227 - DNA, 35 bp, Artificial Sequence
  5' primer for llama IgG1 constant region
gttgttgatcaagaaccacatggaggatgcacgtg

SEQ ID NO: 228 - DNA, 32 bp, Artificial Sequence
  5' primer for llama IgG2 constant region
gttgttgatcaagaacccaagacaccaaaacc

SEQ ID NO: 229 - DNA, 33 bp, Artificial Sequence
  5' primer for llama IgG3 constant region
gttgttgatcaagcgcaccacagcgaagacccc

SEQ ID NO: 230 - DNA, 19 bp, Artificial Sequence
  Llama Fc sense sequencing primer
ctgagatcgagttcagctg

SEQ ID NO: 231 - DNA, 19 bp, Artificial Sequence
  Llama Fc antisense sequencing primer
cctcctttggctttgtctc

SEQ ID NO: 232 - DNA, 1527 bp, Artificial Sequence
  fusion polynucleotide
  misc_feature 843, 852, 861, 864, 867, 873: n = A,T,C or G
aagcttgccgccatggattttcaagtgcagattttcagcttcctgctaatcagtgcttcagtcataattgccagaggacaaattgttctctcccagtctccagcaatcctgtctgcatctccaggggagaaggtcacaatgacttgcagggccagctcaagtgtaagttacatgcactggtaccagcagaagccaggatcctcccccaaaccctggatttatgccccatccaacctggcttctggagtccctgctcgcttcagtggcagtgggtctgggacctcttactctctcacaatcagcagagtggaggctgaagatgctgccacttattactgccagcagtggagttttaacccacccacgttcggtgctgggaccaagctggagctgaaagatggcggtggctcgggcggtggtggatctggaggaggtgggagctctcaggcttatctacagcagtctggggctgagctggtgaggcctggggcctcagtgaagatgtcctgcaaggcttctggctacacatttaccagttacaatatgcactgggtaaagcagacacctagacagggcctggaatggattggagctatttatccaggaaatggtgatacttcctacaatcagaagttcaagggcaaggccacactgactgtagacaaatcctccagcacagcctacatgcagctcagcagcctgacatctgaagactctgcggtctatttctgtgcaagagtggtgtactatagtaactcttactggtacttcgatgtctggggcacagggaccacggtcaccgtctcttctgatcaagaaccacatggaggatgcacgtgcccncagtgcccncaatgcccngcnccngaactnccaggaggcccttctgtctttgtcttccccccgaaacccaaggacgtcctctccatttttggaggccgagtcacgtgcgttgtagtggacgtcggaaagaaagaccccgaggtcaatttcaactggtatattgatggcgttgaggtgcgaacggccaatacgaagccaaaagaggaacagttcaacagcacgtaccgcgtggtcagcgtcctgcccatccagcaccaggactggctgacggggaaggaattcaagtgcaaggtcaacaacaaagctctcccggcccccatcgagaggaccatctccaaggccaaagggcagacccgggagccgcaggtgtacaccctggccccacaccgggaagaactggccaaggacaccgtgagcgtaacatgcctggtcaaaggcttctacccagctgacatcaacgttgagtggcagaggaacggtcagccggagtcagagggcacctacgccaacacgccgccacagctggacaacgacgggacctacttcctctacagcaagctctcggtgggaaagaacacgtggcagcggggagaaaccttaacctgtgtggtgatgcatgaggccctgcacaaccactacacccagaaatccatcacccagtcttcgggtaaatagtaatctaga

SEQ ID NO: 233 - DNA, 1566 bp, Artificial Sequence
  fusion polynucleotide
aagcttgccgccatggattttcaagtgcagattttcagcttcctgctaatcagtgcttcagtcataattgccagaggacaaattgttctctcccagtctccagcaatcctgtctgcatctccaggggagaaggtcacaatgacttgcagggccagctcaagtgtaagttacatgcactggtaccagcagaagccaggatcctcccccaaaccctggatttatgccccatccaacctggcttctggagtccctgctcgcttcagtggcagtgggtctgggacctcttactctctcacaatcagcagagtggaggctgaagatgctgccacttattactgccagcagtggagttttaacccacccacgttcggtgctgggaccaagctggagctgaaagatggcggtggctcgggcggtggtggatctggaggaggtgggagctctcaggcttatctacagcagtctggggctgagctggtgaggcctggggcctcagtgaagatgtcctgcaaggcttctggctacacatttaccagttacaatatgcactgggtaaagcagacacctagacagggcctggaatggattggagctatttatccaggaaatggtgatacttcctacaatcagaagttcaagggcaaggccacactgactgtagacaaatcctccagcacagcctacatgcagctcagcagcctgacatctgaagactctgcggtctatttctgtgcaagagtggtgtactatagtaactcttactggtacttcgatgtctggggcacagggaccacggtcaccgtctcttctgatcaagaacccaagacaccaaaaccacaaccacaaccacaaccacaacccaatcctacaacagaatccaagtgtcccaaatgtccagcccctgagctcctgggagggccctcagtcttcatcttccccccgaaacccaaggacgtcctctccatttctgggaggcccgaggtcacgtgcgttgtggtagacgtgggccaggaagaccccgaggtcagtttcaactggtacattgatggcgctgaggtgcgaacggccaacacgaggccaaaagaggaacagttcaacagcacgtaccgcgtggtcagcgtcctgcccatccagcaccaggactggctgacggggaaggaattcaagtgcaaggtcaacaacaaagctctcccggcccccatcgagaagaccatctccaaggccaaagggcagacccgggagccgcaggtgtacaccctggccccacaccgggaagagctggccaaggacaccgtgagcgtaacatgcctggtcaaaggcttctacccacctgatatcaacgttgagtggcagaggaatgggcagccggagtcagagggcacytacgccaccacgccaccccagctggacaacgacgggacctacttcctctacagcaagctctcggtgggaaagaacacgtggcagcagggagaaaccttcacctgtgtggtgatgcacgaggccctgcacaaccactacacccagaaatccatcacccagtcttcgggtaaatagtaatctaga

SEQ ID NO: 234 - DNA, 1536 bp, Artificial Sequence
  fusion polynucleotide
aagcttgccgccatggattttcaagtgcagattttcagcttcctgctaatcagtgcttcagtcataattgccagaggacaaattgttctctcccagtctccagcaatcctgtctgcatctccaggggagaaggtcacaatgacttgcagggccagctcaagtgtaagttacatgcactggtaccagcagaagccaggatcctcccccaaaccctggatttatgccccatccaacctggcttctggagtccctgctcgcttcagtggcagtgggtctgggacctcttactctctcacaatcagcagagtggaggctgaagatgctgccacttattactgccagcagtggagttttaacccacccacgttcggtgctgggaccaagctggagctgaaagatggcggtggctcgggcggtggtggatctggaggaggtgggagctctcaggcttatctacagcagtctggggctgagctggtgaggcctggggcctcagtgaagatgtcctgcaaggcttctggctacacatttaccagttacaatatgcactgggtaaagcagacacctagacagggcctggaatggattggagctatttatccaggaaatggtgatacttcctacaatcagaagttcaagggcaaggccacactgactgtagacaaatcctccagcacagcctacatgcagctcagcagcctgacatctgaagactctgcggtctatttctgtgcaagagtggtgtactatagtaactcttactggtacttcgatgtctggggcacagggaccacggtcaccgtctcttctgatcaagcgaaccacagcgaagaccccagctccaagtgtcccaaatgcccaggccctgaactccttggagggcccacggtcttcatcttccccccgaaagccaaggacgtcctctccatcacccgaaaacctgaggtcacgtgcttgtggtggacgtgggtaaagaagaccctgagatcgagttcaagctggtccgtggatgacacagaggtacacacggctgagacaaagccaaaggaggaacagttcaacagcacgtaccgcgtggtcagcgtcctgcccatccagcaccaggactggctgacggggaaggaattcaagtgcaaggtcaacaacaaagctctcccagcccccatcgagaggaccatctccaaggccaaagggcagacccgggagccgcaggtgtacaccctggccccacaccgggaagagctggccaaggacaccgtgagcgtaacctgcctggtcaaaggcttcttcccagctgacatcaacgttgagtggcagaggaatgggcagccggagtcagagggcacctacgccaacacgccgccacagctggacaacgacgggacctacttcctctacagcaaactctccgtgggaaagaacacgtggcagcagggagaagtcttcacctgtgtggtgatgcacgaggctctacacaatcactccacccagaaatccatcacccagtcttcgggtaaatagtaatctagagggccc

SEQ ID NO: 235 - protein, 498 aa, Artificial Sequence
  fusion polypeptide
MDFQVQIFSFLLISASVIIARGQIVLSQSPAILSASPGEKVTMTCRASSSVSYMHWYQQKPGSSPKPWIYAPSNLASGVPARFSGSGSGTSYSLTISRVEAEDAATYYCQQWSFNPPTFGAGTKLELKDGGGSGGGGSGGGGSSQAYLQQSGAELVRPGASVKMSCKASGYTFTSYNMHWVKQTPRQGLEWIGAIYPGNGDTSYNQKFKGKATLTVDKSSSTAYMQLSSLTSEDSAVYFCARVVYYSNSYWYFDVWGTGTTVTVSSDQEPHGGCTCPQCPAPELPGGPSVFVFPPKPKDVLSIFGGRVTCVVVDVGKKDPEVNFNWYIDGVEVRTANTKPKEEQFNSTYRVVSVLPIQHQDWLTGKEFKCKVNNKALPAPIERTISKAKGQTREPQVYTLAPHREELAKDTVSVTCLVKGFYPADINVEWQRNGQPESEGTYANTPPQLDNDGTYFLYSKLSVGKNTWQRGETLTCVVMHEALHNHYTQKSITQSSGK

SEQ ID NO: 236 - protein, 514 aa, Artificial Sequence
  fusion polypeptide
MDFQVQIFSFLLISASVIIARGQIVLSQSPAILSASPGEKVTMTCRASSSVSYMHWYQQKPGSSPKPWIYAPSNLASGVPARFSGSGSGTSYSLTISRVEAEDAATYYCQQWSFNPPTFGAGTKLELKDGGGSGGGGSGGGGSSQAYLQQSGAELVRPGASVKMSCKASGYTFTSYNMHWVKQTPRQGLEWIGAIYPGNGDTSYNQKFKGKATLTVDKSSSTAYMQLSSLTSEDSAVYFCARVVYYSNSYWYFDVWGTGTTVTVSSDQEPKTPKPQPQPQPQPNPTTESKCPKCPAPELLGGPSVFIFPPKPKDVLSISGRPEVTCVVVDVGQEDPEVSFNWYIDGAEVRTANTRPKEEQFNSTYRVVSVLPIQHQDWLTGKEFKCKVNNKALPAPIEKTISKAKGQTREPQVYTLAPHREELAKDTVSVTCLVKGFYPPDINVEWQRNGQPESEGTYATTPPQLDNDGTYFLYSKLSVGKNTWQQGETFTCVVMHEALHNHYTQKSITQSSGK

SEQ ID NO: 237 - protein, 503 aa, Artificial Sequence
  fusion polypeptide
MDFQVQIFSFLLISASVIIARGQIVLSQSPAILSASPGEKVTMTCRASSSVSYMHWYQQKPGSSPKPWIYAPSNLASGVPARFSGSGSGTSYSLTISRVEAEDAATYYCQQWSFNPPTFGAGTKLELKDGGGSGGGGSGGGGSSQAYLQQSGAELVRPGASVKMSCKASGYTFTSYNMHWVKQTPRQGLEWIGAIYPGNGDTSYNQKFKGKATLTVDKSSSTAYMQLSSLTSEDSAVYFCARVVYYSNSYWYFDVWGTGTTVTVSSDQAHSHSEDPSSKCPKCPGPELLGGPTVFIFPPKAKDVLSITRKPEVTCLWWTWVKKTLRSSSSWSVDDTEVHTAETKPKEEQFNSTYRVVSVLPIQHQDWLTGKEFKCKVNNKALPAPIERTISKAKGQTREPQVYTLAPHREELAKDTVSVTCLVKGFFPADINVEWQRNGQPESEGTYANTPPQLDNDGTYFLYSKLSVGKNTWQQGEVFTCVVMHEALHNHSTQKSITQSSGK

SEQ ID NO: 238 - DNA, 42 bp, Artificial Sequence
  3'-primer for llama IgG1, IgG2, IgG3 constant region
gttgtttctagattactatttacccgaagactgggtgatgga

SEQ ID NO: 239 - DNA, 1521 bp, Artificial Sequence
  fusion polynucleotide
aagcttgccgccatggattttcaagtgcagattttcagcttcctgctaatcagtgcttcagtcataattgccagaggacaaattgttctctcccagtctccagcaatcctgtctgcatctccaggggagaaggtcacaatgacttgcagggccagctcaagtgtaagttacatgcactggtaccagcagaagccaggatcctcccccaaaccctggatttatgccccatccaacctggcttctggagtccctgctcgcttcagtggcagtgggtctgggacctcttactctctcacaatcagcagagtggaggctgaagatgctgccacttattactgccagcagtggagttttaacccacccacgttcggtgctgggaccaagctggagctgaaagatggcggtggctcgggcggtggtggatctggaggaggtgggagctctcaggcttatctacagcagtctggggctgagctggtgaggcctggggcctcagtgaagatgtcctgcaaggcttctggctacacatttaccagttacaatatgcactgggtaaagcagacacctagacagggcctggaatggattggagctatttatccaggaaatggtgatacttcctacaatcagaagttcaagggcaaggccacactgactgtagacaaatcctccagcacagcctacatgcagctcagcagcctgacatctgaagactctgcggtctatttctgtgcaagagtggtgtactatagtaactcttactggtacttcgatgtctggggcacagggaccacggtcaccgtctcttctgatcaggagcccaaatcttgtgacaaaactcacacatgcccaccgtgcccagcacctgaactcctggggggaccgtcagtcttcctcttccccccaaaacccaaggacaccctcatgatctcccggacccctgaggtcacatgcgtggtggtggacgtgagccacgaagaccctgaggtcaagttcaactggtacgtggacggcgtggaggtgcataatgccaagacaaagccgcgggaggagcagtacaacagcacgtaccgtgtggtcagcgtcctcaccgtcctgcaccaggactggctgaatggcaaggagtacaagtgcaaggtctccaacaaagccctcccagcccccatcgagaaaacaatctccaaagccaaagggcagccccgagaaccacaggtgtacaccctgcccccatcccgggatgagctgaccaagaaccaggtcagcctgacctgcctggtcaaaggcttctatcccagcgacatcgccgtggagtgggagagcaatgggcagccggagaacaactacaagaccacgcctcccgtgctggactccgacggctccttcttcctctacagcaagctcaccgtggacaagagcaggtggcagcaggggaacgtcttctcatgctccgtgatgcatgaggctctgcacaaccactacacgcagaagagcctctccctgtctccgggtaaatgatctaga

SEQ ID NO: 240 - protein, 500 aa, Artificial Sequence
  fusion polypeptide
MDFQVQIFSFLLISASVIIARGQIVLSQSPAILSASPGEKVTMTCRASSSVSYMHWYQQKPGSSPKPWIYAPSNLASGVPARFSGSGSGTSYSLTISRVEAEDAATYYCQQWSFNPPTFGAGTKLELKDGGGSGGGGSGGGGSSQAYLQQSGAELVRPGASVKMSCKASGYTFTSYNMHWVKQTPRQGLEWIGAIYPGNGDTSYNQKFKGKATLTVDKSSSTAYMQLSSLTSEDSAVYFCARVVYYSNSYWYFDVWGTGTTVTVSSDQEPKSCDKTHTCPPCPAPELLGGPSVFLFPPKPKDTLMISRTPEVTCVVVDVSHEDPEVKFNWYVDGVEVHNAKTKPREEQYNSTYRVVSVLTVLHQDWLNGKEYKCKVSNKALPAPIEKTISKAKGQPREPQVYTLPPSRDELTKNQVSLTCLVKGFYPSDIAVEWESNGQPENNYKTTPPVLDSDGSFFLYSKLTVDKSRWQQGNVFSCSVMHEALHNHYTQKSLSLSPGK

SEQ ID NO: 241 - DNA, 162 bp, Artificial Sequence
  fusion polynucleotide
gcggatccttcgaacctgctcccatcctgggccattaccttaatctcagtaaatggaatttttgtgatatgctgcctgacctactgctttgccccaagatgcagagagagaaggaggaatgagagattgagaagggaaagtgtacgccctgtataaatcgat

SEQ ID NO: 242 - protein, 51 aa, Artificial Sequence
  fusion polypeptide
ADPSNLLPSWAITLISVNGIFVICCLTYCFAPRCRERRRNERLRRESVRPV

SEQ ID NO: 243 - DNA, 399 bp, Artificial Sequence
  fusion polynucleotide
aagcttatggattttcaagtgcagattttcagcttcctgctaatcagtgcttcagtcataatgtccagaggagtcgacattgttctgactcagtctccagccaccctgtctgtgactccaggagatagagtctctctttcctgcagggccagccagagtattagcgactacttacactggtatcaacaaaaatcacatgagtctccaaggcttctcatcaaatatgcttcccattccatctctgggatcccctccaggttcagtggcagtggatcagggtcagatttcactctcagtatcaacagtgtggaacctgaagatgttggaatttattactgtcaacatggtcacagctttccgtggacgttcggtggaggcaccaagctggaaatcaaacgg

SEQ ID NO: 244 - protein, 131 aa, Artificial Sequence
  fusion polypeptide
MDFQVQIFSFLLISASVIMSRGVDIVLTQSPATLSVTPGDRVSLSCRASQSISDYLHWYQQKSHESPRLLIKYASHSISGIPSRFSGSGSGSDFTLSINSVEPEDVGIYYCQHGHSFPWTFGGGTKLEIKR

SEQ ID NO: 245 - DNA, 368 bp, Artificial Sequence
  fusion polynucleotide
cagatccagttggtgcaatctggacctgagctgaagaagcctggagagacagtcaggatctcctgcaaggcttctgggtatgccttcacaactactggaatgcagtgggtgcaagagatgccaggaaagggtttgaagtggattggctggataaacaccccactctggagtgccaaaatatgtagaagacttcaaggacggtttgccttctctttggaaacctctgccaacactgcatatttacagataagcaacctcaaagatgaggacacggctacgtatttctgtgtgagatccgggaatggtaactatgacctggcctactttgcttactggggccaagggacactggtcactgtctctgatca

SEQ ID NO: 246 - protein, 121 aa, Artificial Sequence
  fusion polypeptide
QIQLVQSGPELKKPGETVRISCKASGYAFTTTGMQWVQEMPGKGLKWIGWINTPLWSAKICRRLQGRFAFSLETSANTAYLQISNLKDEDTATYFCVRSGNGNYDLAYFAYWGQGTLVTVS

SEQ ID NO: 247 - DNA, 812 bp, Artificial Sequence
  fusion polynucleotide
aagcttatggattttcaagtgcagattttcagcttcctgctaatcagtgcttcagtcataatgtccagaggagtcgacattgttctgactcagtctccagccaccctgtctgtgactccaggagatagagtctctctttcctgcagggccagccagagtattagcgactacttacactggtatcaacaaaaatcacatgagtctccaaggcttctcatcaaatatgcttcccattccatctctgggatcccctccaggttcagtggcagtggatcagggtcagatttcactctcagtatcaacagtgtggaacctgaagatgttggaatttattactgtcaacatggtcacagctttccgtggacgttcggtggaggcaccaagctggaaatcaaacggggtggcggtggctcgggcggaggtgggtcgggtggcggcggatctcagatccagttggtgcaatctggacctgagctgaagaagcctggagagacagtcaggatctcctgcaaggcttctgggtatgccttcacaactactggaatgcagtgggtgcaagagatgccaggaaagggtttgaagtggattggctggataaacaccccactctggagtgccaaaatatgtagaagacttcaaggacggtttgccttctctttggaaacctctgccaacactgcatatttacagataagcaacctcaaagatgaggacacggctacgtatttctgtgtgagatccgggaatggtaactatgacctggcctactttgcttactggggccaagggacactggtcactgtctctgatca

SEQ ID NO: 248 - protein, 267 aa, Artificial Sequence
  fusion polypeptide
MDFQVQIFSFLLISASVIMSRGVDIVLTQSPATLSVTPGDRVSLSCRASQSISDYLHWYQQKSHESPRLLIKYASHSISGIPSRFSGSGSGSDFTLSINSVEPEDVGIYYCQHGHSFPWTFGGGTKLEIKRGGGGSGGGGSGGGGSQIQLVQSGPELKKPGETVRISCKASGYAFTTTGMQWVQEMPGKGLKWIGWINTPLWSAKICRRLQGRFAFSLETSANTAYLQISNLKDEDTATYFCVRSGNGNYDLAYFAYWGQGTLVTVS

SEQ ID NO: 249 - DNA, 405 bp, Artificial Sequence
  fusion polynucleotide
atggattttcaagtgcagattttcagcttcctgctaatcagtgcttcagtcataatgtccagaggagtcgacattgtgctcacccaatctccagcttctttggctgtgtctctaggtcagagagccaccatctcctgcagagccagtgaaagtgttgaatattatgtcacaagtttaatgcagtggtaccaacagaaaccaggacagccacccaaactcctcatctctgctgcatccaacgtagaatctggggtccctgccaggtttagtggcagtgggtctgggacagacttcagcctcaacatccatcctgtggaggaggatgatattgcaatgtatttctgtcagcaaagtaggaaggttccttggacgttcggtggaggcaccaagctggaaatcaaacgg

SEQ ID NO: 250 - protein, 135 aa, Artificial Sequence
  fusion polypeptide
MDFQVQIFSFLLISASVIMSRGVDIVLTQSPASLAVSLGQRATISCRASESVEYYVTSLMQWYQQKPGQPPKLLISAASNVESGVPARFSGSGSGTDFSLNIHPVEEDDIAMYFCQQSRKVPWTFGGGTKLEIKR

SEQ ID NO: 251 - DNA, 369 bp, Artificial Sequence
  fusion polynucleotide
caggtgcagctgaaggagtcaggacctggcctggtggcgccctcacagagcctgtccatcacatgcaccgtctcagggttctcattaaccggctatggtgtaaactgggttcgccagcctccaggaaagggtctggagtggctgggaatgatatggggtgatggaagcacagactataattcagctctcaaatccagactgagcatcaccaaggacaactccaagagccaagttttcttaaaaatgaacagtctgcaaactgatgacacagccagatactactgtgccagagatggttatagtaactttcattactatgttatggactactggggtcaaggaacctcagtcaccgtctcctcagatctg

SEQ ID NO: 252 - protein, 121 aa, Artificial Sequence
  fusion polypeptide
QVQLKESGPGLVAPSQSLSITCTVSGFSLTGYGVNWVRQPPGKGLEWLGMIWGDGSTDYNSALKSRLSITKDNSKSQVFLKMNSLQTDDTARYYCARDGYSNFHYYVMDYWGQGTSVTVSS

SEQ ID NO: 253 - DNA, 825 bp, Artificial Sequence
  fusion polynucleotide
aagcttatggattttcaagtgcagattttcagcttcctgctaatcagtgcttcagtcataatgtccagaggagtcgacattgtgctcacccaatctccagcttctttggctgtgtctctaggtcagagagccaccatctcctgcagagccagtgaaagtgttgaatattatgtcacaagtttaatgcagtggtaccaacagaaaccaggacagccacccaaactcctcatctctgctgcatccaacgtagaatctggggtccctgccaggtttagtggcagtgggtctgggacagacttcagcctcaacatccatcctgtggaggaggatgatattgcaatgtatttctgtcagcaaagtaggaaggttccttggacgttcggtggaggcaccaagctggaaatcaaacggggtggcggtggctcgggcggaggtgggtcgggtggcggcggatctcaggtgcagctgaaggagtcaggacctggcctggtggcgccctcacagagcctgtccatcacatgcaccgtctcagggttctcattaaccggctatggtgtaaactgggttcgccagcctccaggaaagggtctggagtggctgggaatgatatggggtgatggaagcacagactataattcagctctcaaatccagactgagcatcaccaaggacaactccaagagccaagttttcttaaaaatgaacagtctgcaaactgatgacacagccagatactactgtgccagagatggttatagtaactttcattactatgttatggactactggggtcaaggaacctcagtcaccgtctcctctgatcag

SEQ ID NO: 254 - protein, 271 aa, Artificial Sequence
  fusion polypeptide
MDFQVQIFSFLLISASVIMSRGVDIVLTQSPASLAVSLGQRATISCRASESVEYYVTSLMQWYQQKPGQPPKLLISAASNVESGVPARFSGSGSGTDFSLNIHPVEEDDIAMYFCQQSRKVPWTFGGGTKLEIKRGGGGSGGGGSGGGGSQVQLKESGPGLVAPSQSLSITCTVSGFSLTGYGVNWVRQPPGKGLEWLGMIWGDGSTDYNSALKSRLSITKDNSKSQVFLKMNSLQTDDTARYYCARDGYSNFHYYVMDYWGQGTSVTVSS

SEQ ID NO: 255 - DNA, 393 bp, Artificial Sequence
  fusion polynucleotide
atggattttcaagtgcagattttcagcttcctgctaatcagtgcttcagtcataatgtccagaggagtcgacatccagatgacacagtctccatcctcactgtctgcatctctgggaggcaaagtcaccatcacttgcaaggcaagccaagacattaagaagtatataggttggtaccaacacaagcctggaaaaggtcccaggctgctcatatattacacatctacattacagccaggcatcccatcaaggttcagtggaagtgggtctgggagagattattccctcagcatcagaaacctggagcctgaagatattgcaacttattattgtcaacagtatgataatcttccattgacgttcggctcggggacaaagttggaaataaaacgg

SEQ ID NO: 256 - protein, 131 aa, Artificial Sequence
  fusion polypeptide
MDFQVQIFSFLLISASVIMSRGVDIQMTQSPSSLSASLGGKVTITCKASQDIKKYIGWYQHKPGKGPRLLIYYTSTLQPGIPSRFSGSGSGRDYSLSIRNLEPEDIATYYCQQYDNLPLTFGSGTKLEIKR

SEQ ID NO: 257 - DNA, 362 bp, Artificial Sequence
  fusion polynucleotide
gatgtacagcttcaggagtcaggacctggcctcgtgaaaccttctcagtctctgtctctcacctgctctgtcactggctactccatcaccagtggtttctactggaactggatccgacagtttccgggaaacaaactggaatggatgggccacataagccacgacggtaggaataactacaacccatctctcataaatcgaatctccatcactcgtgacacatctaagaaccagtttttcctgaagttgagttctgtgactactgaggacacagctacatatttctgtgcaagacactacggtagtagcggagctatggactactggggtcaaggaacctcagtcaccgtctcctctgatca

SEQ ID NO: 258 - protein, 119 aa, Artificial Sequence
  fusion polypeptide
DVQLQESGPGLVKPSQSLSLTCSVTGYSITSGFYWNWIRQFPGNKLEWMGHISHDGRNNYNPSLINRISITRDTSKNQFFLKLSSVTTEDTATYFCARHYGSSGAMDYWGQGTSVTVSS

SEQ ID NO: 259 - DNA, 806 bp, Artificial Sequence
  fusion polynucleotide
aagcttatggattttcaagtgcagattttcagcttcctgctaatcagtgcttcagtcataatgtccagaggagtcgacatccagatgacacagtctccatcctcactgtctgcatctctgggaggcaaagtcaccatcacttgcaaggcaagccaagacattaagaagtatataggttggtaccaacacaagcctggaaaaggtcccaggctgctcatatattacacatctacattacagccaggcatcccatcaaggttcagtggaagtgggtctgggagagattattccctcagcatcagaaacctggagcctgaagatattgcaacttattattgtcaacagtatgataatcttccattgacgttcggctcggggacaaagttggaaataaaacggggtggcggtggctcgggcggtggtgggtcgggtggcggcggatctgatgtacagcttcaggagtcaggacctggcctcgtgaaaccttctcagtctctgtctctcacctgctctgtcactggctactccatcaccagtggtttctactggaactggatccgacagtttccgggaaacaaactggaatggatgggccacataagccacgacggtaggaataactacaacccatctctcataaatcgaatctccatcactcgtgacacatctaagaaccagtttttcctgaagttgagttctgtgactactgaggacacagctacatatttctgtgcaagacactacggtagtagcggagctatggactactggggtcaaggaacctcagtcaccgtctcctctgatca

SEQ ID NO: 260 - protein, 266 aa, Artificial Sequence
  fusion polypeptide
MDFQVQIFSFLLISASVIMSRGVDIQMTQSPSSLSASLGGKVTITCKASQDIKKYIGWYQHKPGKGPRLLIYYTSTLQPGIPSRFSGSGSGRDYSLSIRNLEPEDIATYYCQQYDNLPLTFGSGTKLEIKRGGGGSGGGGSGGGGSDVQLQESGPGLVKPSQSLSLTCSVTGYSITSGFYWNWIRQFPGNKLEWMGHISHDGRNNYNPSLINRISITRDTSKNQFFLKLSSVTTEDTATYFCARHYGSSGAMDYWGQGTSVTVSSD

SEQ ID NO: 261 - DNA, 417 bp, Artificial Sequence
  fusion polynucleotide
atggcatggagctgcattattttcttcttggtatcagtaattacaggtgtccattcccaggtcaagctgcagcagtccggttctgaactagggaaacctggggcctcagtgaaactgtcctgcaagacttcaggctacatattcacagatcactatatttcttgggtgaaacagaagcctggagaaagcctgcagtggataggaaatgtttatggtggaaatggtggtacaagctacaatcaaaaattccagggcaaggccacactgactgtagataaaatctctagcacagcctacatggaactcagcagcctgacatctgaggattctgccatctattactgtgcaagaaggccggtagcgacgggccatgctatggactactggggtcaggggatccaagttaccgtctcctca

SEQ ID NO: 262 - protein, 139 aa, Artificial Sequence
  fusion polypeptide
MAWSCIIFFLVSVITGVHSQVKLQQSGSELGKPGASVKLSCKTSGYIFTDHYISWVKQKPGESLQWIGNVYGGNGGTSYNQKFQGKATLTVDKISSTAYMELSSLTSEDSAIYYCARRPVATGHAMDYWGQGIQVTVSS

SEQ ID NO: 263 - DNA, 381 bp, Artificial Sequence
  fusion polynucleotide
atgttgtatacatctcagctccttgggcttttactcttctggatttcagcctccagaagtgacatagtgctgactcagactccagccactctgtctctaattcctggagaaagagtcacaatgacctgtaagaccagtcagaatattggcacaatcttacactggtatcaccaaaaaccaaaggaggctccaagggctctcatcaagtatgcttcgcagtccattcctgggatcccctccagattcagtggcagtggttcggaaacagatttcactctcagcatcaataacctggagcctgatgatatcggaatttattactgtcaacaaagtagaagctggcctgtcacgttcggtcctggcaccaagctggagataaaa

SEQ ID NO: 264 - protein, 127 aa, Artificial Sequence
  fusion polypeptide
MLYTSQLLGLLLFWISASRSDIVLTQTPATLSLIPGERVTMTCKTSQNIGTILHWYHQKPKEAPRALIKYASQSIPGIPSRFSGSGSETDFTLSINNLEPDDIGIYYCQQSRSWPVTFGPGTKLEIK

SEQ ID NO: 265 - DNA, 1671 bp, Artificial Sequence
  fusion polynucleotide
aagcttatggattttcaagtgcagattttcagcttcctgctaatcagtgcttcagtcataatgtccagaggagtcgacattgttctgactcagtctccagccaccctgtctgtgactccaggagatagagtctctctttcctgcagggccagccagagtattagcgactacttacactggtatcaacaaaaatcacatgagtctccaaggcttctcatcaaatatgcttcccattccatctctgggatcccctccaggttcagtggcagtggatcagggtcagatttcactctcagtatcaacagtgtggaacctgaagatgttggaatttattactgtcaacatggtcacagctttccgtggacgttcggtggaggcaccaagctggaaatcaaacggggtggcggtggctcgggcggaggtgggtcgggtggcggcggatctcagatccagttggtgcaatctggacctgagctgaagaagcctggagagacagtcaggatctcctgcaaggcttctgggtatgccttcacaactactggaatgcagtgggtgcaagagatgccaggaaagggtttgaagtggattggctggataaacaccccactctggagtgccaaaatatgtagaagacttcaaggacggtttgccttctctttggaaacctctgccaacactgcatatttacagataagcaacctcaaagatgaggacacggctacgtatttctgtgtgagatccgggaatggtaactatgacctggcctactttgcttactggggccaagggacactggtcactgtctctgatctggagcccaaatcttctgacaaaactcacacatccccaccgtccccagcacctgaactcctggggggatcgtcagtcttcctcttccccccaaaacccaaggacaccctcatgatctcccggacccctgaggtcacatgcgtggtggtggacgtgagccacgaagaccctgaggtcaagttcaactggtacgtggacggcgtggaggtgcataatgccaagacaaagccgcgggaggagcagtacaacagcacgtaccgtgtggtcagcgtcctcaccgtcctgcaccaggactggctgaatggcaaggagtacaagtgcaaggtctccaacaaagccctcccagcccccatcgagaaaaccatctccaaagccaaagggcagccccgagaaccacaggtgtacaccctgcccccatcccgggatgagctgaccaagaaccaggtcagcctgacctgcctggtcaaaggcttctatcccagcgacatcgccgtggagtgggagagcaatgggcagccggagaacaactacaagaccacgcctcccgtgctggactccgacggctccttcttcctctacagcaagctcaccgtggacaagagcaggtggcagcaggggaacgtcttctcatgctccgtgatgcatgaggctctgcacaaccactacacgcagaagagcctctccctgtctccgggtaaagcggatccttcgaacctgctcccatcctgggccattaccttaatctcagtaaatggaatttttgtgatatgctgcctgacctactgctttgccccaagatgcagagagagaaggaggaatgagagattgagaagggaaagtgtacgccctgtataaatcgat

SEQ ID NO: 266 - protein, 552 aa, Artificial Sequence
  fusion polypeptide
MDFQVQIFSFLLISASVIMSRGVDIVLTQSPATLSVTPGDRVSLSCRASQSISDYLHWYQQKSHESPRLLIKYASHSISGIPSRFSGSGSGSDFTLSINSVEPEDVGIYYCQHGHSFPWTFGGGTKLEIKRGGGGSGGGGSGGGGSQIQLVQSGPELKKPGETVRISCKASGYAFTTTGMQWVQEMPGKGLKWIGWINTPLWSAKICRRLQGRFAFSLETSANTAYLQISNLKDEDTATYFCVRSGNGNYDLAYFAYWGQGTLVTVSDLEPKSSDKTHTSPPSPAPELLGGSSVFLFPPKPKDTLMISRTPEVTCVVVDVSHEDPEVKFNWYVDGVEVHNAKTKPREEQYNSTYRVVSVLTVLHQDWLNGKEYKCKVSNKALPAPIEKTISKAKGQPREPQVYTLPPSRDELTKNQVSLTCLVKGFYPSDIAVEWESNGQPENNYKTTPPVLDSDGSFFLYSKLTVDKSRWQQGNVFSCSVMHEALHNHYTQKSLSLSPGKADPSNLLPSWAITLISVNGIFVICCLTYCFAPRCRERRRNERLRRESVRPV

SEQ ID NO: 267 - DNA, 1683 bp, Artificial Sequence
  fusion polynucleotide
aagcttatggattttcaagtgcagattttcagcttcctgctaatcagtgcttcagtcataatgtccagaggagtcgacattgtgctcacccaatctccagcttctttggctgtgtctctaggtcagagagccaccatctcctgcagagccagtgaaagtgttgaatattatgtcacaagtttaatgcagtggtaccaacagaaaccaggacagccacccaaactcctcatctctgctgcatccaacgtagaatctggggtccctgccaggtttagtggcagtgggtctgggacagacttcagcctcaacatccatcctgtggaggaggatgatattgcaatgtatttctgtcagcaaagtaggaaggttccttggacgttcggtggaggcaccaagctggaaatcaaacggggtggcggtggctcgggcggaggtgggtcgggtggcggcggatctcaggtgcagctgaaggagtcaggacctggcctggtggcgccctcacagagcctgtccatcacatgcaccgtctcagggttctcattaaccggctatggtgtaaactgggttcgccagcctccaggaaagggtctggagtggctgggaatgatatggggtgatggaagcacagactataattcagctctcaaatccagactgagcatcaccaaggacaactccaagagccaagttttcttaaaaatgaacagtctgcaaactgatgacacagccagatactactgtgccagagatggttatagtaactttcattactatgttatggactactggggtcaaggaacctcagtcaccgtctcctcagatctggagcccaaatcttctgacaaaactcacacatccccaccgtccccagcacctgaactcctggggggatcgtcagtcttcctcttccccccaaaacccaaggacaccctcatgatctcccggacccctgaggtcacatgcgtggtggtggacgtgagccacgaagaccctgaggtcaagttcaactggtacgtggacggcgtggaggtgcataatgccaagacaaagccgcgggaggagcagtacaacagcacgtaccgtgtggtcagcgtcctcaccgtcctgcaccaggactggctgaatggcaaggagtacaagtgcaaggtctccaacaaagccctcccagcccccatcgagaaaaccatctccaaagccaaagggcagccccgagaaccacaggtgtacaccctgcccccatcccgggatgagctgaccaagaaccaggtcagcctgacctgcctggtcaaaggcttctatcccagcgacatcgccgtggagtgggagagcaatgggcagccggagaacaactacaagaccacgcctcccgtgctggactccgacggctccttcttcctctacagcaagctcaccgtggacaagagcaggtggcagcaggggaacgtcttctcatgctccgtgatgcatgaggctctgcacaaccactacacgcagaagagcctctccctgtctccgggtaaagcggatccttcgaacctgctcccatcctgggccattaccttaatctcagtaaatggaatttttgtgatatgctgcctgacctactgctttgccccaagatgcagagagagaaggaggaatgagagattgagaagggaaagtgtacgccctgtataaatcgat

SEQ ID NO: 268 - protein, 556 aa, Artificial Sequence
  fusion polypeptide
MDFQVQIFSFLLISASVIMSRGVDIVLTQSPASLAVSLGQRATISCRASESVEYYVTSLMQWYQQKPGQPPKLLISAASNVESGVPARFSGSGSGTDFSLNIHPVEEDDIAMYFCQQSRKVPWTFGGGTKLEIKRGGGGSGGGGSGGGGSQVQLKESGPGLVAPSQSLSITCTVSGFSLTGYGVNWVRQPPGKGLEWLGMIWGDGSTDYNSALKSRLSITKDNSKSQVFLKMNSLQTDDTARYYCARDGYSNFHYYVMDYWGQGTSVTVSSDLEPKSSDKTHTSPPSPAPELLGGSSVFLFPPKPKDTLMISRTPEVTCVVVDVSHEDPEVKFNWYVDGVEVHNAKTKPREEQYNSTYRVVSVLTVLHQDWLNGKEYKCKVSNKALPAPIEKTISKAKGQPREPQVYTLPPSRDELTKNQVSLTCLVKGFYPSDIAVEWESNGQPENNYKTTPPVLDSDGSFFLYSKLTVDKSRWQQGNVFSCSVMHEALHNHYTQKSLSLSPGKADPSNLLPSWAITLISVNGIFVICCLTYCFAPRCRERRRNERLRRESVRPV

SEQ ID NO: 269 - DNA, 1665 bp, Artificial Sequence
  fusion polynucleotide
aagcttatggattttcaagtgcagattttcagcttcctgctaatcagtgcttcagtcataatgtccagaggagtcgacatccagatgacacagtctccatcctcactgtctgcatctctgggaggcaaagtcaccatcacttgcaaggcaagccaagacattaagaagtatataggttggtaccaacacaagcctggaaaaggtcccaggctgctcatatattacacatctacattacagccaggcatcccatcaaggttcagtggaagtgggtctgggagagattattccctcagcatcagaaacctggagcctgaagatattgcaacttattattgtcaacagtatgataatcttccattgacgttcggctcggggacaaagttggaaataaaacggggtggcggtggctcgggcggtggtgggtcgggtggcggcggatctgatgtacagcttcaggagtcaggacctggcctcgtgaaaccttctcagtctctgtctctcacctgctctgtcactggctactccatcaccagtggtttctactggaactggatccgacagtttccgggaaacaaactggaatggatgggccacataagccacgacggtaggaataactacaacccatctctcataaatcgaatctccatcactcgtgacacatctaagaaccagtttttcctgaagttgagttctgtgactactgaggacacagctacatatttctgtgcaagacactacggtagtagcggagctatggactactggggtcaaggaacctcagtcaccgtctcctctgatctggagcccaaatcttctgacaaaactcacacatccccaccgtccccagcacctgaactcctggggggatcgtcagtcttcctcttccccccaaaacccaaggacaccctcatgatctcccggacccctgaggtcacatgcgtggtggtggacgtgagccacgaagaccctgaggtcaagttcaactggtacgtggacggcgtggaggtgcataatgccaagacaaagccgcgggaggagcagtacaacagcacgtaccgtgtggtcagcgtcctcaccgtcctgcaccaggactggctgaatggcaaggagtacaagtgcaaggtctccaacaaagccctcccagcccccatcgagaaaaccatctccaaagccaaagggcagccccgagaaccacaggtgtacaccctgcccccatcccgggatgagctgaccaagaaccaggtcagcctgacctgcctggtcaaaggcttctatcccagcgacatcgccgtggagtgggagagcaatgggcagccggagaacaactacaagaccacgcctcccgtgctggactccgacggctccttcttcctctacagcaagctcaccgtggacaagagcaggtggcagcaggggaacgtcttctcatgctccgtgatgcatgaggctctgcacaaccactacacgcagaagagcctctccctgtctccgggtaaagcggatccttcgaacctgctcccatcctgggccattaccttaatctcagtaaatggaatttttgtgatatgctgcctgacctactgctttgccccaagatgcagagagagaaggaggaatgagagattgagaagggaaagtgtacgccctgtataaatcgat

SEQ ID NO: 270 - protein, 550 aa, Artificial Sequence
  fusion polypeptide
MDFQVQIFSFLLISASVIMSRGVDIQMTQSPSSLSASLGGKVTITCKASQDIKKYIGWYQHKPGKGPRLLIYYTSTLQPGIPSRFSGSGSGRDYSLSIRNLEPEDIATYYCQQYDNLPLTFGSGTKLEIKRGGGGSGGGGSGGGGSDVQLQESGPGLVKPSQSLSLTCSVTGYSITSGFYWNWIRQFPGNKLEWMGHISHDGRNNYNPSLINRISITRDTSKNQFFLKLSSVTTEDTATYFCARHYGSSGAMDYWGQGTSVTVSSDLEPKSSDKTHTSPPSPAPELLGGSSVFLFPPKPKDTLMISRTPEVTCVVVDVSHEDPEVKFNWYVDGVEVHNAKTKPREEQYNSTYRVVSVLTVLHQDWLNGKEYKCKVSNKALPAPIEKTISKAKGQPREPQVYTLPPSRDELTKNQVSLTCLVKGFYPSDIAVEWESNGQPENNYKTTPPVLDSDGSFFLYSKLTVDKSRWQQGNVFSCSVMHEALHNHYTQKSLSLSPGKADPSNLLPSWAITLISVNGIFVICCLTYCFAPRCRERRRNERLRRESVRPV

SEQ ID NO: 271 - DNA, 1653 bp, Artificial Sequence
  fusion polynucleotide
atgttgtatacatctcagctccttgggcttttactcttctggatttcagcctccagaagtgacatagtgctgactcagactccagccactctgtctctaattcctggagaaagagtcacaatgacctgtaagaccagtcagaatattggcacaatcttacactggtatcaccaaaaaccaaaggaggctccaagggctctcatcaagtatgcttcgcagtccattcctgggatcccctccagattcagtggcagtggttcggaaacagatttcactctcagcatcaataacctggagcctgatgatatcggaatttattactgtcaacaaagtagaagctggcctgtcacgttcggtcctggcaccaagctggagataaaacggggtggcggtggctcgggcggaggtgggtcgggtggcggcggatctcaggtcaagctgcagcagtccggttctgaactagggaaacctggggcctcagtgaaactgtcctgcaagacttcaggctacatattcacagatcactatatttcttgggtgaaacagaagcctggagaaagcctgcagtggataggaaatgtttatggtggaaatggtggtacaagctacaatcaaaaattccagggcaaggccacactgactgtagataaaatctctagcacagcctacatggaactcagcagcctgacatctgaggattctgccatctattactgtgcaagaaggccggtagcgacgggccatgctatggactactggggtcaggggatccaagttaccgtctcctctgatctggagcccaaatcttctgacaaaactcacacatccccaccgtccccagcacctgaactcctggggggatcgtcagtcttcctcttccccccaaaacccaaggacaccctcatgatctcccggacccctgaggtcacatgcgtggtggtggacgtgagccacgaagaccctgaggtcaagttcaactggtacgtggacggcgtggaggtgcataatgccaagacaaagccgcgggaggagcagtacaacagcacgtaccgtgtggtcagcgtcctcaccgtcctgcaccaggactggctgaatggcaaggagtacaagtgcaaggtctccaacaaagccctcccagcccccatcgagaaaaccatctccaaagccaaagggcagccccgagaaccacaggtgtacaccctgcccccatcccgggatgagctgaccaagaaccaggtcagcctgacctgcctggtcaaaggcttctatcccagcgacatcgccgtggagtgggagagcaatgggcagccggagaacaactacaagaccacgcctcccgtgctggactccgacggctccttcttcctctacagcaagctcaccgtggacaagagcaggtggcagcaggggaacgtcttctcatgctccgtgatgcatgaggctctgcacaaccactacacgcagaagagcctctccctgtctccgggtaaagcggatccttcgaacctgctcccatcctgggccattaccttaatctcagtaaatggaatttttgtgatatgctgcctgacctactgctttgccccaagatgcagagagagaaggaggaatgagagattgagaagggaaagtgtacgccctgtataaatcgat

SEQ ID NO: 272 - protein, 548 aa, Artificial Sequence
  fusion polypeptide
MLYTSQLLGLLLFWISASRSDIVLTQTPATLSLIPGERVTMTCKTSQNIGTILHWYHQKPKEAPRALIKYASQSIPGIPSRFSGSGSETDFTLSINNLEPDDIGIYYCQQSRSWPVTFGPGTKLEIKRGGGGSGGGGSGGGGSQVKLQQSGSELGKPGASVKLSCKTSGYIFTDHYISWVKQKPGESLQWIGNVYGGNGGTSYNQKFQGKATLTVDKISSTAYMELSSLTSEDSAIYYCARRPVATGHAMDYWGQGIQVTVSSDLEPKSSDKTHTSPPSPAPELLGGSSVFLFPPKPKDTLMISRTPEVTCVVVDVSHEDPEVKFNWYVDGVEVHNAKTKPREEQYNSTYRVVSVLTVLHQDWLNGKEYKCKVSNKALPAPIEKTISKAKGQPREPQVYTLPPSRDELTKNQVSLTCLVKGFYPSDIAVEWESNGQPENNYKTTPPVLDSDGSFFLYSKLTVDKSRWQQGNVFSCSVMHEALHNHYTQKSLSLSPGKADPSNLLPSWAITLISVNGIFVICCLTYCFAPRCRERRRNERLRRESVRPV

SEQ ID NO: 273 - DNA, 1521 bp, Artificial Sequence
  fusion polynucleotide
aagcttgccgccatggattttcaagtgcagattttcagcttcctgctaatcagtgcttcagtcataattgccagaggacaaattgttctctcccagtctccagcaatcctgtctgcatctccaggggagaaggtcacaatgacttgcagggccagctcaagtgtaagttacatgcactggtaccagcagaagccaggatcctcccccaaaccctggatttatgccccatccaacctggcttctggagtccctgctcgcttcagtggcagtgggtctgggacctcttactctctcacaatcagcagagtggaggctgaagatgctgccacttattactgccagcagtggagttttaacccacccacgttcggtgctgggaccaagctggagctgaaagatggcggtggctcgggcggtggtggatctggaggaggtgggagctctcaggcttatctacagcagtctggggctgagctggtgaggcctggggcctcagtgaagatgtcctgcaaggcttctggctacacatttaccagttacaatatgcactgggtaaagcagacacctagacagggcctggaatggattggagctatttatccaggaaatggtgatacttcctacaatcagaagttcaagggcaaggccacactgactgtagacaaatcctccagcacagcctacatgcagctcagcagcctgacatctgaagactctgcggtctatttctgtgcaagagtggtgtactatagtaactcttactggtacttcgatgtctggggcacagggaccacggtcaccgtctcttctgatcaggagcccaaatcttctgacaaaactcacacatccccaccgtccccagcacctgaactcctggggggaccgtcagtcttcctcttccccccaaaacccaaggacaccctcatgatctcccggacccctgaggtcacatgcgtggtggtggacgtgagccacgaagaccctgaggtcaagttcaactggtacgtggacggcgtggaggtgcataatgccaagacaaagccgcgggaggagcagtacaacagcacgtaccgtgtggtcagcgtcctcaccgtcctgcaccaggactggctgaatggcaaggagtacaagtgcaaggtctccaacaaagccctcccagcccccatcgagaaaacaatctccaaagccaaagggcagccccgagaaccacaggtgtacaccctgcccccatcccgggatgagctgaccaagaaccaggtcagcctgacctgcctggtcaaaggcttctatcccagcgacatcgccgtggagtgggagagcaatgggcagccggagaacaactacaagaccacgcctcccgtgctggactccgacggctccttcttcctctacagcaagctcaccgtggacaagagcaggtggcagcaggggaacgtcttctcatgctccgtgatgcatgaggctctgcacaaccactacacgcagaagagcctctccctgtctccgggtaaatgatctaga

SEQ ID NO: 274 - protein, 500 aa, Artificial Sequence
  fusion polypeptide
MDFQVQIFSFLLISASVIIARGQIVLSQSPAILSASPGEKVTMTCRASSSVSYMHWYQQKPGSSPKPWIYAPSNLASGVPARFSGSGSGTSYSLTISRVEAEDAATYYCQQWSFNPPTFGAGTKLELKDGGGSGGGGSGGGGSSQAYLQQSGAELVRPGASVKMSCKASGYTFTSYNMHWVKQTPRQGLEWIGAIYPGNGDTSYNQKFKGKATLTVDKSSSTAYMQLSSLTSEDSAVYFCARVVYYSNSYWYFDVWGTGTTVTVSSDQEPKSSDKTHTSPPSPAPELLGGPSVFLFPPKPKDTLMISRTPEVTCVVVDVSHEDPEVKFNWYVDGVEVHNAKTKPREEQYNSTYRVVSVLTVLHQDWLNGKEYKCKVSNKALPAPIEKTISKAKGQPREPQVYTLPPSRDELTKNQVSLTCLVKGFYPSDIAVEWESNGQPENNYKTTPPVLDSDGSFFLYSKLTVDKSRWQQGNVFSCSVMHEALHNHYTQKSLSLSPGK

SEQ ID NO: 275 - DNA, 64 bp, Artificial Sequence
  Oligo to make IgG hinge SSC mutant using IgG hinge SSS as a template
gttgttgatcaggagcccaaatcttctgacaaaactcacacatctccaccgtgcccagcacctg

SEQ ID NO: 276 - DNA, 51 bp, Artificial Sequence
  Oligo to make IgG hinge SCS mutant using IgG hinge SSS as a template
gttgttgatcaggagcccaaatcttctgacaaaactcacacatgcccaccg

SEQ ID NO: 277 - DNA, 39 bp, Artificial Sequence
  Oligo to make IgG hinge CSS mutant using IgG hinge SSS as a template
gttgttgatcaggagcccaaatcttgtgacaaaactcac

SEQ ID NO: 278 - DNA, 52 bp, Artificial Sequence
  3' oligo to amplify constant regions for creating IgG hinge mutatnts
gttgtttctagatcatttacccggagacagggagaggctcttctgcgtgtag

SEQ ID NO: 279 - DNA, 56 bp, Artificial Sequence
  Oligo that mutates VH11 L to S
ggaggtgggagctctcaggcttatctacagcagtctggggctgagtcggtgaggcc

SEQ ID NO: 280 - DNA, 30 bp, Artificial Sequence
  3' oligo for amplifying IgG1 constant regions
gtctctagactatcatttacccggagacag

SEQ ID NO: 281 - DNA, 54 bp, Artificial Sequence
  5' oligo for first PCR to insert IgA hinge into IgG1 CH2-CH3
ccatctccctcaactccacctaccccatctccctcatgcgcacctgaactcctg

SEQ ID NO: 282 - DNA, 50 bp, Artificial Sequence
  5' oligo for second PCR to insert IgA hinge into fused to  IgG1 CH2
gttgttgatcagccagttccctcaactccacctaccccatctccccaact

SEQ ID NO: 283 - DNA, 1536 bp, Artificial Sequence
  fusion polynucleotide
aagcttgccgccatggattttcaagtgcagattttcagcttcctgctaatcagtgcttcagtcataattgccagaggacaaattgttctctcccagtctccagcaatcctgtctgcatctccaggggagaaggtcacaatgacttgcagggccagctcaagtgtaagttacatgcactggtaccagcagaagccaggatcctcccccaaaccctggatttatgccccatccaacctggcttctggagtccctgctcgcttcagtggcagtgggtctgggacctcttactctctcacaatcagcagagtggaggctgaagatgctgccacttattactgccagcagtggagttttaacccacccacgttcggtgctgggaccaagctggagctgaaagatggcggtggctcgggcggtggtggatctggaggaggtgggagctctcaggcttatctacagcagtctggggctgagctggtgaggcctggggcctcagtgaagatgtcctgcaaggcttctggctacacatttaccagttacaatatgcactgggtaaagcagacacctagacagggcctggaatggattggagctatttatccaggaaatggtgatacttcctacaatcagaagttcaagggcaaggccacactgactgtagacaaatcctccagcacagcctacatgcagctcagcagcctgacatctgaagactctgcggtctatttctgtgcaagagtggtgtactatagtaactcttactggtacttcgatgtctggggcacagggaccacggtcaccgtctctgatcagccagttccctcaactccacctaccccatctccctcaactccacctaccccatctccctcatgcgcacctgaactcctggggggaccgtcagtcttcctcttccccccaaaacccaaggacaccctcatgatctcccggacccctgaggtcacatgcgtggtggtggacgtgagccacgaagaccctgaggtcaagttcaactggtacgtggacggcgtggaggtgcataatgccaagacaaagccgcgggaggagcagtacaacagcacgtaccgtgtggtcagcgtcctcaccgtcctgcaccaggactggctgaatggcaaggagtacaagtgcaaggtctccaacaaagccctcccagcccccatcgagaaaacaatctccaaagccaaagggcagccccgagaaccacaggtgtacaccctgcccccatcccgggatgagctgaccaagaaccaggtcagcctgacctgcctggtcaaaggcttctatcccagcgacatcgccgtggagtgggagagcaatgggcagccggagaacaactacaagaccacgcctcccgtgctggactccgacggctccttcttcctctacagcaagctcaccgtggacaagagcaggtggcagcaggggaacgtcttctcatgctccgtgatgcatgaggctctgcacaaccactacacgcagaagagcctctccctgtctccgggtaaatgatctaga

SEQ ID NO: 284 - protein, 505 aa, Artificial Sequence; identical to SEQ ID NO: 18
  fusion polypeptide

SEQ ID NO: 285 - DNA, 1584 bp, Artificial Sequence
  fusion polynucleotide
aagcttgccgccatggattttcaagtgcagattttcagcttcctgctaatcagtgcttcagtcataattgccagaggacaaattgttctctcccagtctccagcaatcctgtctgcatctccaggggagaaggtcacaatgacttgcagggccagctcaagtgtaagttacatgcactggtaccagcagaagccaggatcctcccccaaaccctggatttatgccccatccaacctggcttctggagtccctgctcgcttcagtggcagtgggtctgggacctcttactctctcacaatcagcagagtggaggctgaagatgctgccacttattactgccagcagtggagttttaacccacccacgttcggtgctgggaccaagctggagctgaaagatggcggtggctcgggcggtggtggatctggaggaggtgggagctctcaggcttatctacagcagtctggggctgagctggtgaggcctggggcctcagtgaagatgtcctgcaaggcttctggctacacatttaccagttacaatatgcactgggtaaagcagacacctagacagggcctggaatggattggagctatttatccaggaaatggtgatacttcctacaatcagaagttcaagggcaaggccacactgactgtagacaaatcctccagcacagcctacatgcagctcagcagcctgacatctgaagactctgcggtctatttctgtgcaagagtggtgtactatagtaactcttactggtacttcgatgtctggggcacagggaccacggtcaccgtctcttctgatcagccagttccctcaactccacctaccccatctccctcaactccacctaccccatctccctcatgctgccacccccgactgtcactgcaccgaccggccctcgaggacctgctcttaggttcagaagcgatcctcacgtgcacactgaccggcctgagagatgcctcaggtgtcaccttcacctggacgccctcaagtgggaagagcgctgttcaaggaccacctgaccgtgacctctgtggctgctacagcgtgtccagtgtcctgccgggctgtgccgagccatggaaccatgggaagaccttcacttgcactgctgcctaccccgagtccaagaccccgctaaccgccaccctctcaaaatccggaaacacattccggcccgaggtccacctgctgccgccgccgtcggaggagctggccctgaacgagctggtgacgctgacgtgcctggcacgtggcttcagccccaaggatgtgctggttcgctggctgcaggggtcacaggagctgccccgcgagaagtacctgacttgggcatcccggcaggagcccagccagggcaccaccaccttcgctgtgaccagcatactgcgcgtggcagccgaggactggaagaagggggacaccttctcctgcatggtgggccacgaggccctgccgctggccttcacacagaagaccatcgaccgcttggcgggtaaacccacccatgtcaatgtgtctgttgtcatggcggaggtggacggcacctgctactgataatctaga

SEQ ID NO: 286 - protein, 520 aa, Artificial Sequence
  fusion polypeptide
MDFQVQIFSFLLISASVIIARGQIVLSQSPAILSASPGEKVTMTCRASSSVSYMHWYQQKPGSSPKPWIYAPSNLASGVPARFSGSGSGTSYSLTISRVEAEDAATYYCQQWSFNPPTFGAGTKLELKDGGGSGGGGSGGGGSSQAYLQQSGAELVRPGASVKMSCKASGYTFTSYNMHWVKQTPRQGLEWIGAIYPGNGDTSYNQKFKGKATLTVDKSSSTAYMQLSSLTSEDSAVYFCARVVYYSNSYWYFDVWGTGTTVTVSSDQPVPSTPPTPSPSTPPTPSPSCCHPRLSLHRPALEDLLLGSEAILTCTLTGLRDASGVTFTWTPSSGKSAVQGPPDRDLCGCYSVSSVLPGCAEPWNHGKTFTCTAAYPESKTPLTATLSKSGNTFRPEVHLLPPPSEELALNELVTLTCLARGFSPKDVLVRWLQGSQELPREKYLTWASRQEPSQGTTTFAVTSILRVAAEDWKKGDTFSCMVGHEALPLAFTQKTIDRLAGKPTHVNVSVVMAEVDGTCY

SEQ ID NO: 287 - DNA, 775 bp, Artificial Sequence
  fusion polynucleotide
tgatcagccagttccctcaactccacctaccccatctccctcaactccacctaccccatctccctcatgctgccacccccgactgtcactgcaccgaccggccctcgaggacctgctcttaggttcagaagcgatcctcacgtgcacactgaccggcctgagagatgcctcaggtgtcaccttcacctggacgccctcaagtgggaagagcgctgttcaaggaccacctgaccgtgacctctgtggctgctacagcgtgtccagtgtcctgccgggctgtgccgagccatggaaccatgggaagaccttcacttgcactgctgcctaccccgagtccaagaccccgctaaccgccaccctctcaaaatccggaaacacattccggcccgaggtccacctgctgccgccgccgtcggaggagctggccctgaacgagctggtgacgctgacgtgcctggcacgtggcttcagccccaaggatgtgctggttcgctggctgcaggggtcacaggagctgccccgcgagaagtacctgacttgggcatcccggcaggagcccagccagggcaccaccaccttcgctgtgaccagcatactgcgcgtggcagccgaggactggaagaagggggacaccttctcctgcatggtgggccacgaggccctgccgctggccttcacacagaagaccatcgaccgcttggcgggtaaacccacccatgtcaatgtgtctgttgtcatggcggaggtggacggcacctgctactgataatctaga

SEQ ID NO: 288 - protein, 254 aa, Artificial Sequence
  fusion polypeptide
DQPVPSTPPTPSPSTPPTPSPSCCHPRLSLHRPALEDLLLGSEAILTCTLTGLRDASGVTFTWTPSSGKSAVQGPPDRDLCGCYSVSSVLPGCAEPWNHGKTFTCTAAYPESKTPLTATLSKSGNTFRPEVHLLPPPSEELALNELVTLTCLARGFSPKDVLVRWLQGSQELPREKYLTWASRQEPSQGTTTFAVTSILRVAAEDWKKGDTFSCMVGHEALPLAFTQKTIDRLAGKPTHVNVSVVMAEVDGTCY

SEQ ID NO: 289 - DNA, 51 bp, Artificial Sequence
  3' oligo to PCR IgA hinge-CH2 CH3
gttgtttctagattatcagtagcaggtgccgtccacctccgccatgacaac

SEQ ID NO: 290 - DNA, 429 bp, Artificial Sequence
  fusion polynucleotide
agatctcaagaagatgaaaggattgttcttgttgacaacaaatgtaagtgtgcccggattacttccaggatcatccgttcttccgaagatcctaatgaggacattgtggagagaaacatccgaattattgttcctctgaacaacagggagaatatctctgatcccacctcaccattgagaaccagatttgtgtaccatttgtctgacctcagctgtaaaaaatgtgatcctacagaagtggagctggataatcagatagttactgctacccagagcaatatctgtgatgaagacagtgctacagagacctgctacacttatgacagaaacaagtgctacacagctgtggtcccactcgtatatggtggtgagaccaaaatggtggaaacagccttaaccccagatgcctgctatcctgactaatctaga

SEQ ID NO: 291 - protein, 139 aa, Artificial Sequence
  fusion polypeptide
RSQEDERIVLVDNKCKCARITSRIIRSSEDPNEDIVERNIRIIVPLNNRENISDPTSPLRTRFVYHLSDLSCKKCDPTEVELDNQIVTATQSNICDEDSATETCYTYDRNKCYTAVVPLVYGGETKMVETALTPDACYP

SEQ ID NO: 292 - DNA, 36 bp, Artificial Sequence
  5' oligo to PCR J chain
gttgttagatctcaagaagatgaaaggattgttctt

SEQ ID NO: 293 - DNA, 36 bp, Artificial Sequence
  3' oligo to PCR J chain
gttgtttctagattagtcaggatagcaggcatctgg

SEQ ID NO: 294 - protein, 4 aa, Artificial Sequence
  4 carboxy terminal amino acids deleted from IgA CH3
GTCY

SEQ ID NO: 295 - DNA, 763 bp, Artificial Sequence; identical to SEQ ID NO: 37
  fusion polynucleotide

SEQ ID NO: 296 - protein, 250 aa, Artificial Sequence; identical to SEQ ID NO: 38
  fusion polypeptide

SEQ ID NO: 297 - DNA, 45 bp, Artificial Sequence
  3' oligo for construct with 4 amino acid deletion in IgA CH3
gttgtttctagattatcagtccacctccgccatgacaacagacac

SEQ ID NO: 298 - DNA, 1572 bp, Artificial Sequence
  fusion polynucleotide
aagcttgccgccatggattttcaagtgcagattttcagcttcctgctaatcagtgcttcagtcataattgccagaggacaaattgttctctcccagtctccagcaatcctgtctgcatctccaggggagaaggtcacaatgacttgcagggccagctcaagtgtaagttacatgcactggtaccagcagaagccaggatcctcccccaaaccctggatttatgccccatccaacctggcttctggagtccctgctcgcttcagtggcagtgggtctgggacctcttactctctcacaatcagcagagtggaggctgaagatgctgccacttattactgccagcagtggagttttaacccacccacgttcggtgctgggaccaagctggagctgaaagatggcggtggctcgggcggtggtggatctggaggaggtgggagctctcaggcttatctacagcagtctggggctgagctggtgaggcctggggcctcagtgaagatgtcctgcaaggcttctggctacacatttaccagttacaatatgcactgggtaaagcagacacctagacagggcctggaatggattggagctatttatccaggaaatggtgatacttcctacaatcagaagttcaagggcaaggccacactgactgtagacaaatcctccagcacagcctacatgcagctcagcagcctgacatctgaagactctgcggtctatttctgtgcaagagtggtgtactatagtaactcttactggtacttcgatgtctggggcacagggaccacggtcaccgtctcttctgatcagccagttccctcaactccacctaccccatctccctcaactccacctaccccatctccctcatgctgccacccccgactgtcactgcaccgaccggccctcgaggacctgctcttaggttcagaagcgatcctcacgtgcacactgaccggcctgagagatgcctcaggtgtcaccttcacctggacgccctcaagtgggaagagcgctgttcaaggaccacctgaccgtgacctctgtggctgctacagcgtgtccagtgtcctgccgggctgtgccgagccatggaaccatgggaagaccttcacttgcactgctgcctaccccgagtccaagaccccgctaaccgccaccctctcaaaatccggaaacacattccggcccgaggtccacctgctgccgccgccgtcggaggagctggccctgaacgagctggtgacgctgacgtgcctggcacgtggcttcagccccaaggatgtgctggttcgctggctgcaggggtcacaggagctgccccgcgagaagtacctgacttgggcatcccggcaggagcccagccagggcaccaccaccttcgctgtgaccagcatactgcgcgtggcagccgaggactggaagaagggggacaccttctcctgcatggtgggccacgaggccctgccgctggccttcacacagaagaccatcgaccgcttggcgggtaaacccacccatgtcaatgtgtctgttgtcatggcggaggtggactgataatctaga

SEQ ID NO: 299 - protein, 516 aa, Artificial Sequence
  fusion polypeptide
MDFQVQIFSFLLISASVIIARGQIVLSQSPAILSASPGEKVTMTCRASSSVSYMHWYQQKPGSSPKPWIYAPSNLASGVPARFSGSGSGTSYSLTISRVEAEDAATYYCQQWSFNPPTFGAGTKLELKDGGGSGGGGSGGGGSSQAYLQQSGAELVRPGASVKMSCKASGYTFTSYNMHWVKQTPRQGLEWIGAIYPGNGDTSYNQKFKGKATLTVDKSSSTAYMQLSSLTSEDSAVYFCARVVYYSNSYWYFDVWGTGTTVTVSSDQPVPSTPPTPSPSTPPTPSPSCCHPRLSLHRPALEDLLLGSEAILTCTLTGLRDASGVTFTWTPSSGKSAVQGPPDRDLCGCYSVSSVLPGCAEPWNHGKTFTCTAAYPESKTPLTATLSKSGNTFRPEVHLLPPPSEELALNELVTLTCLARGFSPKDVLVRWLQGSQELPREKYLTWASRQEPSQGTTTFAVTSILRVAAEDWKKGDTFSCMVGHEALPLAFTQKTIDRLAGKPTHVNVSVVMAEVD

SEQ ID NO: 300 - protein, 14 aa, Artificial Sequence
  14 amino acids deleted from IgAH-T4 (so that total of 18 amino acids deleted from wild type IgA CH3
PTHVNVSVVMAEVD

SEQ ID NO: 301 - DNA, 45 bp, Artificial Sequence
  3' oligo for engineering 14 amino acid from IgA-T4
gttgtttctagattatcatttacccgccaagcggtcgatggtctt

SEQ ID NO: 302 - DNA, 709 bp, Artificial Sequence
  fusion polynucleotide
tgatcagccagttccctcaactccacctaccccatctccctcaactccacctaccccatctccctcatgctgccacccccgactgtcactgcaccgaccggccctcgaggacctgctcttaggttcagaagcgatcctcacgtgcacactgaccggcctgagagatgcctcaggtgtcaccttcacctggacgccctcaagtgggaagagcgctgttcaaggaccacctgaccgtgacctctgtggctgctacagcgtgtccagtgtcctgccgggctgtgccgagccatggaaccatgggaagaccttcacttgcactgctgcctaccccgagtccaagaccccgctaaccgccaccctctcaaaatccggaaacacattccggcccgaggtccacctgctgccgccgccgtcggaggagctggccctgaacgagctggtgacgctgacgtgcctggcacgtggcttcagccccaaggatgtgctggttcgctggctgcaggggtcacaggagctgccccgcgagaagtacctgacttgggcatcccggcaggagcccagccagggcaccaccaccttcgctgtgaccagcatactgcgcgtggcagccgaggactggaagaagggggacaccttctcctgcatggtgggccacgaggccctgccgctggccttcacacagaagaccatcgaccgcttggcgggtaaa

SEQ ID NO: 303 - protein, 236 aa, Artificial Sequence
  fusion polypeptide
DQPVPSTPPTPSPSTPPTPSPSCCHPRLSLHRPALEDLLLGSEAILTCTLTGLRDASGVTFTWTPSSGKSAVQGPPDRDLCGCYSVSSVLPGCAEPWNHGKTFTCTAAYPESKTPLTATLSKSGNTFRPEVHLLPPPSEELALNELVTLTCLARGFSPKDVLVRWLQGSQELPREKYLTWASRQEPSQGTTTFAVTSILRVAAEDWKKGDTFSCMVGHEALPLAFTQKTIDRLAGK

SEQ ID NO: 304 - DNA, 1518 bp, Artificial Sequence
  fusion polynucleotide
aagcttgccgccatggattttcaagtgcagattttcagcttcctgctaatcagtgcttcagtcataattgccagaggacaaattgttctctcccagtctccagcaatcctgtctgcatctccaggggagaaggtcacaatgacttgcagggccagctcaagtgtaagttacatgcactggtaccagcagaagccaggatcctcccccaaaccctggatttatgccccatccaacctggcttctggagtccctgctcgcttcagtggcagtgggtctgggacctcttactctctcacaatcagcagagtggaggctgaagatgctgccacttattactgccagcagtggagttttaacccacccacgttcggtgctgggaccaagctggagctgaaagatggcggtggctcgggcggtggtggatctggaggaggtgggagctctcaggcttatctacagcagtctggggctgagctggtgaggcctggggcctcagtgaagatgtcctgcaaggcttctggctacacatttaccagttacaatatgcactgggtaaagcagacacctagacagggcctggaatggattggagctatttatccaggaaatggtgatacttcctacaatcagaagttcaagggcaaggccacactgactgtagacaaatcctccagcacagcctacatgcagctcagcagcctgacatctgaagactctgcggtctatttctgtgcaagagtggtgtactatagtaactcttactggtacttcgatgtctggggcacagggaccacggtcaccgtctcttctgatcagccagttccctcaactccacctaccccatctccctcaactccacctaccccatctccctcatgctgccacccccgactgtcactgcaccgaccggccctcgaggacctgctcttaggttcagaagcgatcctcacgtgcacactgaccggcctgagagatgcctcaggtgtcaccttcacctggacgccctcaagtgggaagagcgctgttcaaggaccacctgaccgtgacctctgtggctgctacagcgtgtccagtgtcctgccgggctgtgccgagccatggaaccatgggaagaccttcacttgcactgctgcctaccccgagtccaagaccccgctaaccgccaccctctcaaaatccggaaacacattccggcccgaggtccacctgctgccgccgccgtcggaggagctggccctgaacgagctggtgacgctgacgtgcctggcacgtggcttcagccccaaggatgtgctggttcgctggctgcaggggtcacaggagctgccccgcgagaagtacctgacttgggcatcccggcaggagcccagccagggcaccaccaccttcgctgtgaccagcatactgcgcgtggcagccgaggactggaagaagggggacaccttctcctgcatggtgggccacgaggccctgccgctggccttcacacagaagaccatcgaccgcttggcgggtaaa

SEQ ID NO: 305 - protein, 502 aa, Artificial Sequence
  fusion polypeptide
MDFQVQIFSFLLISASVIIARGQIVLSQSPAILSASPGEKVTMTCRASSSVSYMHWYQQKPGSSPKPWIYAPSNLASGVPARFSGSGSGTSYSLTISRVEAEDAATYYCQQWSFNPPTFGAGTKLELKDGGGSGGGGSGGGGSSQAYLQQSGAELVRPGASVKMSCKASGYTFTSYNMHWVKQTPRQGLEWIGAIYPGNGDTSYNQKFKGKATLTVDKSSSTAYMQLSSLTSEDSAVYFCARVVYYSNSYWYFDVWGTGTTVTVSSDQPVPSTPPTPSPSTPPTPSPSCCHPRLSLHRPALEDLLLGSEAILTCTLTGLRDASGVTFTWTPSSGKSAVQGPPDRDLCGCYSVSSVLPGCAEPWNHGKTFTCTAAYPESKTPLTATLSKSGNTFRPEVHLLPPPSEELALNELVTLTCLARGFSPKDVLVRWLQGSQELPREKYLTWASRQEPSQGTTTFAVTSILRVAAEDWKKGDTFSCMVGHEALPLAFTQKTIDRLAGK

SEQ ID NO: 306 - DNA, 924 bp, Artificial Sequence
  fusion polynucleotide
gcaacctacatgatggggaatgagttgaccttcctagatgattccatctgcacgggcacctccagtggaaatcaagtgaacctcactatccaaggactgagggccatggacacgggactctacatctgcaaggtggagctcatgtacccaccgccatactacctgggcataggcaacggaacccagatttatgtaattgatccagaaccgtgcccagattctgatcaacccaaatcttgtgacaaaactcacacatgcccaccgtgcccagcacctgaactcctggggggaccgtcagtcttcctcttccccccaaaacccaaggacaccctcatgatctcccggacccctgaggtcacatgcgtggtggtggacgtgagccacgaagaccctgaggtcaagttcaactggtacgtggacggcgtggaggtgcataatgccaagacaaagccgcgggaggagcagtacaacagcacgtaccgtgtggtcagcgtcctcaccgtcctgcaccaggactggctgaatggcaaggagtacaagtgcaaggtctccaacaaagccctcccagcccccatcgagaaaacaatctccaaagccaaagggcagccccgagaaccacaggtgtacaccctgcccccatcccgggatgagctgaccaagaaccaggtcagcctgacctgcctggtcaaaggcttctatcccagcgacatcgccgtggagtgggagagcaatgggcagccggagaacaactacaagaccacgcctcccgtgctggactccgacggctccttcttcctctacagcaagctcaccgtggacaagagcaggtggcagcaggggaacgtcttctcatgctccgtgatgcatgaggctctgcacaaccactacacgcagaagagcctctccctgtctccgggtaaatga

SEQ ID NO: 307 - protein, 382 aa, Artificial Sequence
  fusion polypeptide
MGVLLTQRTLLSLVLALLFPSMASMAMHVAQPAVVLASSRGIASFVCEYASPGKATEVRVTVLRQADSQVTEVCAATYMMGNELTFLDDSICTGTSSGNQVNLTIQGLRAMDTGLYICKVELMYPPPYYLGIGNGTQIYVIDPEPCPDSDQPKSCDKTHTCPPCPAPELLGGPSVFLFPPKPKDTLMISRTPEVTCVVVDVSHEDPEVKFNWYVDGVEVHNAKTKPREEQYNSTYRVVSVLTVLHQDWLNGKEYKCKVSNKALPAPIEKTISKAKGQPREPQVYTLPPSRDELTKNQVSLTCLVKGFYPSDIAVEWESNGQPENNYKTTPPVLDSDGSFFLYSKLTVDKSRWQQGNVFSCSVMHEALHNHYTQKSLSLSPGK

SEQ ID NO: 308 - DNA, 453 bp, Artificial Sequence
  fusion polynucleotide
atgggggtactgctcacacagaggacgctgctcagtctggtccttgcactcctgtttccaagcatggcgagcatggcaatgcacgtggcccagcctgctgtggtactggccagcagccgaggcatcgccagctttgtgtgtgagtatgcatctccaggcaaagccactgaggtccgggtgacagtgcttcggcaggctgacagccaggtgactgaagtctgtgcggcaacctacatgatggggaatgagttgaccttcctagatgattccatctgcacgggcacctccagtggaaatcaagtgaacctcactatccaaggactgagggccatggacacgggactctacatctgcaaggtggagctcatgtacccaccgccatactacctgggcataggcaacggaacccagatttatgtaattgatccagaaccgtgcccagattctgatcaa

SEQ ID NO: 309 - protein, 151 aa, Artificial Sequence
  fusion polypeptide
MGVLLTQRTLLSLVLALLFPSMASMAMHVAQPAVVLASSRGIASFVCEYASPGKATEVRVTVLRQADSQVTEVCAATYMMGNELTFLDDSICTGTSSGNQVNLTIQGLRAMDTGLYICKVELMYPPPYYLGIGNGTQIYVIDPEPCPDSDQ

SEQ ID NO: 310 - DNA, 51 bp, Artificial Sequence
  5' oligo for engineering 14 amino acids from IgA-T4
gttgttgatcagccagttccctcaactccacctaccccatctccctcaact

SEQ ID NO: 311 - DNA, 75 bp, Artificial Sequence
  fusion polynucleotide
atgggggtactgctcacacagaggacgctgctcagtctggtccttgcactcctgtttccaagcatggcgagcatg

SEQ ID NO: 312 - protein, 22 aa, Artificial Sequence
  fusion polypeptide
MGVLLTQRTLLSLVLALLFPSM

SEQ ID NO: 313 - DNA, 372 bp, Artificial Sequence
  fusion polynucleotide
gcaatgcacgtggcccagcctgctgtggtactggccagcagccgaggcatcgccagctttgtgtgtgagtatgcatctccaggcaaagccactgaggtccgggtgacagtgcttcggcaggctgacagccaggtgactgaagtctgtgcggcaacctacatgacggggaatgagttgaccttcctagatgattccatctgcacgggcacctccagtggaaatcaagtgaacctcactatccaaggactgagggccatggacacgggactctacatctgcaaggtggagctcatgtacccaccgccatactacctgggcataggcaacggaacccagatttatgtaattgatccagaaccgtgcccagattct

SEQ ID NO: 314 - protein, 124 aa, Artificial Sequence
  fusion polypeptide
AMHVAQPAVVLASSRGIASFVCEYASPGKATEVRVTVLRQADSQVTEVCAATYMTGNELTFLDDSICTGTSSGNQVNLTIQGLRAMDTGLYICKVELMYPPPYYLGIGNGTQIYVIDPEPCPDS

SEQ ID NO: 315 - DNA, 1149 bp, Artificial Sequence
  fusion polynucleotide
atgggggtactgctcacacagaggacgctgctcagtctggtccttgcactcctgtttccaagcatggcgagcatggcaatgcacgtggcccagcctgctgtggtactggccagcagccgaggcatcgccagctttgtgtgtgagtatgcatctccaggcaaagccactgaggtccgggtgacagtgcttcggcaggctgacagccaggtgactgaagtctgtgcggcaacctacatgatggggaatgagttgaccttcctagatgattccatctgcacgggcacctccagtggaaatcaagtgaacctcactatccaaggactgagggccatggacacgggactctacatctgcaaggtggagctcatgtacccaccgccatactacctgggcataggcaacggaacccagatttatgtaattgatccagaaccgtgcccagattctgatcaacccaaatcttctgacaaaactcacacatccccaccgtccccagcacctgaactcctggggggatcgtcagtcttcctcttccccccaaaacccaaggacaccctcatgatctcccggacccctgaggtcacatgcgtggtggtggacgtgagccacgaagaccctgaggtcaagttcaactggtacgtggacggcgtggaggtgcataatgccaagacaaagccgcgggaggagcagtacaacagcacgtaccgtgtggtcagcgtcctcaccgtcctgcaccaggactggctgaatggcaaggagtacaagtgcaaggtctccaacaaagccctcccagcccccatcgagaaaacaatctccaaagccaaagggcagccccgagaaccacaggtgtacaccctgcccccatcccgggatgagctgaccaagaaccaggtcagcctgacctgcctggtcaaaggcttctatcccagcgacatcgccgtggagtgggagagcaatgggcagccggagaacaactacaagaccacgcctcccgtgctggactccgacggctccttcttcctctacagcaagctcaccgtggacaagagcaggtggcagcaggggaacgtcttctcatgctccgtgatgcatgaggctctgcacaaccactacacgcagaagagcctctccctgtctccgggtaaatga

SEQ ID NO: 316 - protein, 382 aa, Artificial Sequence
  fusion polypeptide
MGVLLTQRTLLSLVLALLFPSMASMAMHVAQPAVVLASSRGIASFVCEYASPGKATEVRVTVLRQADSQVTEVCAATYMMGNELTFLDDSICTGTSSGNQVNLTIQGLRAMDTGLYICKVELMYPPPYYLGIGNGTQIYVIDPEPCPDSDQPKSSDKTHTSPPSPAPELLGGSSVFLFPPKPKDTLMISRTPEVTCVVVDVSHEDPEVKFNWYVDGVEVHNAKTKPREEQYNSTYRVVSVLTVLHQDWLNGKEYKCKVSNKALPAPIEKTISKAKGQPREPQVYTLPPSRDELTKNQVSLTCLVKGFYPSDIAVEWESNGQPENNYKTTPPVLDSDGSFFLYSKLTVDKSRWQQGNVFSCSVMHEALHNHYTQKSLSLSPGK

SEQ ID NO: 317 - DNA, 1221 bp, Artificial Sequence
  fusion polynucleotide
atgggggtactgctcacacagaggacgctgctcagtctggtccttgcactcctgtttccaagcatggcgagcatggcaatgcacgtggcccagcctgctgtggtactggccagcagccgaggcatcgccagctttgtgtgtgagtatgcatctccaggcaaagccactgaggtccgggtgacagtgcttcggcaggctgacagccaggtgactgaagtctgtgcggcaacctacatgatggggaatgagttgaccttcctagatgattccatctgcacgggcacctccagtggaaatcaagtgaacctcactatccaaggactgagggccatggacacgggactctacatctgcaaggtggagctcatgtacccaccgccatactacctgggcataggcaacggaacccagatttatgtaattgatccagaaccgtgcccagattctgatcagccagttccctcaactccacctaccccatctccctcaactccacctaccccatctccctcatgctgccacccccgactgtcactgcaccgaccggccctcgaggacctgctcttaggttcagaagcgatcctcacgtgcacactgaccggcctgagagatgcctcaggtgtcaccttcacctggacgccctcaagtgggaagagcgctgttcaaggaccacctgaccgtgacctctgtggctgctacagcgtgtccagtgtcctgccgggctgtgccgagccatggaaccatgggaagaccttcacttgcactgctgcctaccccgagtccaagaccccgctaaccgccaccctctcaaaatccggaaacacattccggcccgaggtccacctgctgccgccgccgtcggaggagctggccctgaacgagctggtgacgctgacgtgcctggcacgtggcttcagccccaaggatgtgctggttcgctggctgcaggggtcacaggagctgccccgcgagaagtacctgacttgggcatcccggcaggagcccagccagggcaccaccaccttcgctgtgaccagcatactgcgcgtggcagccgaggactggaagaagggggacaccttctcctgcatggtgggccacgaggccctgccgctggccttcacacagaagaccatcgaccgcttggcgggtaaacccacccatgtcaatgtgtctgttgtcatggcggaggtggacggcacctgctactgataatctaga

SEQ ID NO: 318 - protein, 403 aa, Artificial Sequence
  fusion polypeptide
MGVLLTQRTLLSLVLALLFPSMASMAMHVAQPAVVLASSRGIASFVCEYASPGKATEVRVTVLRQADSQVTEVCAATYMMGNELTFLDDSICTGTSSGNQVNLTIQGLRAMDTGLYICKVELMYPPPYYLGIGNGTQIYVIDPEPCPDSDQPVPSTPPTPSPSTPPTPSPSCCHPRLSLHRPALEDLLLGSEAILTCTLTGLRDASGVTFTWTPSSGKSAVQGPPDRDLCGCYSVSSVLPGCAEPWNHGKTFTCTAAYPESKTPLTATLSKSGNTFRPEVHLLPPPSEELALNELVTLTCLARGFSPKDVLVRWLQGSQELPREKYLTWASRQEPSQGTTTFAVTSILRVAAEDWKKGDTFSCMVGHEALPLAFTQKTIDRLAGKPTHVNVSVVMAEVDGTCY

SEQ ID NO: 319 - DNA, 1209 bp, Artificial Sequence
  fusion polynucleotide
atgggggtactgctcacacagaggacgctgctcagtctggtccttgcactcctgtttccaagcatggcgagcatggcaatgcacgtggcccagcctgctgtggtactggccagcagccgaggcatcgccagctttgtgtgtgagtatgcatctccaggcaaagccactgaggtccgggtgacagtgcttcggcaggctgacagccaggtgactgaagtctgtgcggcaacctacatgatggggaatgagttgaccttcctagatgattccatctgcacgggcacctccagtggaaatcaagtgaacctcactatccaaggactgagggccatggacacgggactctacatctgcaaggtggagctcatgtacccaccgccatactacctgggcataggcaacggaacccagatttatgtaattgatccagaaccgtgcccagattctgatcagccagttccctcaactccacctaccccatctccctcaactccacctaccccatctccctcatgctgccacccccgactgtcactgcaccgaccggccctcgaggacctgctcttaggttcagaagcgatcctcacgtgcacactgaccggcctgagagatgcctcaggtgtcaccttcacctggacgccctcaagtgggaagagcgctgttcaaggaccacctgaccgtgacctctgtggctgctacagcgtgtccagtgtcctgccgggctgtgccgagccatggaaccatgggaagaccttcacttgcactgctgcctaccccgagtccaagaccccgctaaccgccaccctctcaaaatccggaaacacattccggcccgaggtccacctgctgccgccgccgtcggaggagctggccctgaacgagctggtgacgctgacgtgcctggcacgtggcttcagccccaaggatgtgctggttcgctggctgcaggggtcacaggagctgccccgcgagaagtacctgacttgggcatcccggcaggagcccagccagggcaccaccaccttcgctgtgaccagcatactgcgcgtggcagccgaggactggaagaagggggacaccttctcctgcatggtgggccacgaggccctgccgctggccttcacacagaagaccatcgaccgcttggcgggtaaacccacccatgtcaatgtgtctgttgtcatggcggaggtggactgataatctaga

SEQ ID NO: 320 - protein, 399 aa, Artificial Sequence
  fusion polypeptide
MGVLLTQRTLLSLVLALLFPSMASMAMHVAQPAVVLASSRGIASFVCEYASPGKATEVRVTVLRQADSQVTEVCAATYMMGNELTFLDDSICTGTSSGNQVNLTIQGLRAMDTGLYICKVELMYPPPYYLGIGNGTQIYVIDPEPCPDSDQPVPSTPPTPSPSTPPTPSPSCCHPRLSLHRPALEDLLLGSEAILTCTLTGLRDASGVTFTWTPSSGKSAVQGPPDRDLCGCYSVSSVLPGCAEPWNHGKTFTCTAAYPESKTPLTATLSKSGNTFRPEVHLLPPPSEELALNELVTLTCLARGFSPKDVLVRWLQGSQELPREKYLTWASRQEPSQGTTTFAVTSILRVAAEDWKKGDTFSCMVGHEALPLAFTQKTIDRLAGKPTHVNVSVVMAEVD

SEQ ID NO: 321 - DNA, 328 bp, Artificial Sequence
  fusion polynucleotide
cctgaactcctggggggatcgtcagtcttcctcttccccccaaaacccaaggacaccctcatgatctcccggacccctgaggtcacatgcgtggtggtggacgtgagccacgaagaccctgaggtcaagttcaactggtacgtggacggcgtggaggtgcataatgccaagacaaagccgcgggaggagcagtacaacagcacgtaccgtgtggtcagcgtcctcaccgtcctgcaccaggactggctgaatggcaaggagtacaagtgcaaggtctccaacaaagccctcccagcccccatcgagaaaaccatctccaaagccaaag

SEQ ID NO: 322 - protein, 109 aa, Artificial Sequence
  fusion polypeptide
PELLGGSSVFLFPPKPKDTLMISRTPEVTCVVVDVSHEDPEVKFNWYVDGVEVHNAKTKPREEQYNSTYRVVSVLTVLHQDWLNGKEYKCKVSNKALPAPIEKTISKAK

SEQ ID NO: 323 - protein, 10 aa, Artificial Sequence
  Amino acids surrounding the proline at 238
PAPELLGGPS

SEQ ID NO: 324 - protein, 10 aa, Artificial Sequence
  Amino acid substitution of Serine for Proline at 238
PAPELLGGSS

SEQ ID NO: 325 - DNA, 35 bp, Artificial Sequence
  5' oligo to PCR IgE Fc
gttgttgatcacgtctgctccagggacttcacccc

SEQ ID NO: 326 - DNA, 49 bp, Artificial Sequence
  3' oligo to PCR IgE Fc
gttgtttctagattaacttttaccgggatttacagacaccgctcgctgg

SEQ ID NO: 327 - DNA, 51 bp, Artificial Sequence
  Oligo to provide open reading frame at carboxy end of CH4 to read into transmembrane and cytoplasmic tail of another protein
gttgttttcgaaggatccgctttaccgggatttacagacaccgctcgctgg

SEQ ID NO: 328 - DNA, 996 bp, Artificial Sequence
  fusion polynucleotide
tgatcacgtctgctccagggacttcaccccgcccaccgtgaagatcttacagtcgtcctgcgacggcggcgggcacttccccccgaccatccagctcctgtgcctcgtctctgggtacaccccagggactatcaacatcacctggctggaggacgggcaggtcatggacgtggacttgtccaccgcctctaccacgcaggagggtgagctggcctccacacaaagcgagctcaccctcagccagaagcactggctgtcagaccgcacctacacctgccaggtcacctatcaaggtcacacctttgaggacagcaccaagaagtgtgcagattccaacccgagaggggtgagcgcctacctaagccggcccagcccgttcgacctgttcatccgcaagtcgcccacgatcacctgtctggtggtggacctggcacccagcaaggggaccgtgaacctgacctggtcccgggccagtgggaagcctgtgaaccactccaccagaaaggaggagaagcagcgcaatggcacgttaaccgtcacgtccaccctgccggtgggcacccgagactggatcgagggggagacctaccagtgcagggtgacccacccccacctgcccagggccctcatgcggtccacgaccaagaccagcggcccgcgtgctgccccggaagtctatgcgtttgcgacgccggagtggccggggagccgggacaagcgcaccctcgcctgcctgatccagaacttcatgcctgaggacatctcggtgcagtggctgcacaacgaggtgcagctcccggacgcccggcacagcacgacgcagccccgcaagaccaagggctccggcttcttcgtcttcagccgcctggaggtgaccagggccgaatgggagcagaaagatgagttcatctgccgtgcagtccatgaggcagcgagcccctcacagaccgtccagcgagcggtgtctgtaaatcccggtaaagcggatccttcgaa

SEQ ID NO: 329 - protein, 331 aa, Artificial Sequence
  fusion polypeptide
DHVCSRDFTPPTVKILQSSCDGGGHFPPTIQLLCLVSGYTPGTINITWLEDGQVMDVDLSTASTTQEGELASTQSELTLSQKHWLSDRTYTCQVTYQGHTFEDSTKKCADSNPRGVSAYLSRPSPFDLFIRKSPTITCLVVDLAPSKGTVNLTWSRASGKPVNHSTRKEEKQRNGTLTVTSTLPVGTRDWIEGETYQCRVTHPHLPRALMRSTTKTSGPRAAPEVYAFATPEWPGSRDKRTLACLIQNFMPEDISVQWLHNEVQLPDARHSTTQPRKTKGSGFFVFSRLEVTRAEWEQKDEFICRAVHEAASPSQTVQRAVSVNPGKADPS

SEQ ID NO: 330 - DNA, 63 bp, Artificial Sequence
  fusion polynucleotide
gttgtttgatcaggagcccaaatcttgtgacaaaactcacacatgcccaccgtgcccagcacc

SEQ ID NO: 331 - DNA, 52 bp, Artificial Sequence; identical to SEQ ID NO: 278
  fusion polynucleotide

SEQ ID NO: 332 - DNA, 91 bp, Artificial Sequence
  fusion polynucleotide
gttgttgatcaggagcccaaatcttctgacaaaactcacacatctccaccgtccccagcacctgaactcctgggtggaccgtcagtcttcc

SEQ ID NO: 333 - DNA, 1800 bp, Artificial Sequence
  fusion polynucleotide
aagcttgccgccatggattttcaagtgcagattttcagcttcctgctaatcagtgcttcagtcataattgccagaggacaaattgttctctcccagtctccagcaatcctgtctgcatctccaggggagaaggtcacaatgacttgcagggccagctcaagtgtaagttacatgcactggtaccagcagaagccaggatcctcccccaaaccctggatttatgccccatccaacctggcttctggagtccctgctcgcttcagtggcagtgggtctgggacctcttactctctcacaatcagcagagtggaggctgaagatgctgccacttattactgccagcagtggagttttaacccacccacgttcggtgctgggaccaagctggagctgaaaggtggcggtggctcgggcggtggtggatctggaggaggtgggagctctcaggcttatctacagcagtctggggctgagctggtgaggcctggggcctcagtgaagatgtcctgcaaggcttctggctacacatttaccagttacaatatgcactgggtaaagcagacacctagacagggcctggaatggattggagctatttatccaggaaatggtgatacttcctacaatcagaagttcaagggcaaggccacactgactgtagacaaatcctccagcacagcctacatgcagctcagcagcctgacatctgaagactctgcggtctatttctgtgcaagagtggtgtactatagtaactcttactggtacttcgatgtctggggcacagggaccacggtcaccgtctctgatcacgtctgctccagggacttcaccccgcccaccgtgaagatcttacagtcgtcctgcgacggcggcgggcacttccccccgaccatccagctcctgtgcctcgtctctgggtacaccccagggactatcaacatcacctggctggaggacgggcaggtcatggacgtggacttgtccaccgcctctaccacgcaggagggtgagctggcctccacacaaagcgagctcaccctcagccagaagcactggctgtcagaccgcacctacacctgccaggtcacctatcaaggtcacacctttgaggacagcaccaagaagtgtgcagattccaacccgagaggggtgagcgcctacctaagccggcccagcccgttcgacctgttcatccgcaagtcgcccacgatcacctgtctggtggtggacctggcacccagcaaggggaccgtgaacctgacctggtcccgggccagtgggaagcctgtgaaccactccaccagaaaggaggagaagcagcgcaatggcacgttaaccgtcacgtccaccctgccggtgggcacccgagactggatcgagggggagacctaccagtgcagggtgacccacccccacctgcccagggccctcatgcggtccacgaccaagaccagcggcccgcgtgctgccccggaagtctatgcgtttgcgacgccggagtggccggggagccgggacaagcgcaccctcgcctgcctgatccagaacttcatgcctgaggacatctcggtgcagtggctgcacaacgaggtgcagctcccggacgcccggcacagcacgacgcagccccgcaagaccaagggctccggcttcttcgtcttcagccgcctggaggtgaccagggccgaatgggagcagaaagatgagttcatctgccgtgcagtccatgaggcagcgagcccctcacagaccgtccagcgagcggtgtctgtaaatcccggtaaatgataatctaga

SEQ ID NO: 334 - protein, 592 aa, Artificial Sequence
  fusion polypeptide
MDFQVQIFSFLLISASVIIARGQIVLSQSPAILSASPGEKVTMTCRASSSVSYMHWYQQKPGSSPKPWIYAPSNLASGVPARFSGSGSGTSYSLTISRVEAEDAATYYCQQWSFNPPTFGAGTKLELKGGGGSGGGGSGGGGSSQAYLQQSGAELVRPGASVKMSCKASGYTFTSYNMHWVKQTPRQGLEWIGAIYPGNGDTSYNQKFKGKATLTVDKSSSTAYMQLSSLTSEDSAVYFCARVVYYSNSYWYFDVWGTGTTVTVSDHVCSRDFTPPTVKILQSSCDGGGHFPPTIQLLCLVSGYTPGTINITWLEDGQVMDVDLSTASTTQEGELASTQSELTLSQKHWLSDRTYTCQVTYQGHTFEDSTKKCADSNPRGVSAYLSRPSPFDLFIRKSPTITCLVVDLAPSKGTVNLTWSRASGKPVNHSTRKEEKQRNGTLTVTSTLPVGTRDWIEGETYQCRVTHPHLPRALMRSTTKTSGPRAAPEVYAFATPEWPGSRDKRTLACLIQNFMPEDISVQWLHNEVQLPDARHSTTQPRKTKGSGFFVFSRLEVTRAEWEQKDEFICRAVHEAASPSQTVQRAVSVNPGK

SEQ ID NO: 335 - DNA, 339 bp, Artificial Sequence
  fusion polynucleotide
caggtgcagctgaaggaggcaggacctggcctggtgcaaccgacacagaccctgtccctcacatgcactgtctctgggttctcattaaccagcgatggtgtacactggattcgacagcctccaggaaagggtctggaatggatgggaataatatattatgatggaggcacagattataattcagcaattaaatccagactgagcatcagcagggacacctccaagagccaagttttcttaaaaatcaacagtctgcaaactgatgacacagccatgtattactgtgccagaatccactttgattactggggccaaggagtcatggtcacagtctcctct

SEQ ID NO: 336 - DNA, 321 bp, Artificial Sequence
  fusion polynucleotide
gacattgtgctcactcagtctccaacaaccatagctgcatctccaggggagaaggtcaccatcacctgccgtgccagctccagtgtaagttacatgtactggtaccagcagaagtcaggcgcctcccctaaactctggatttatgacacatccaagctggcttctggagttccaaatcgcttcagtggcagtgggtctgggacctcttattctctcgcaatcaacaccatggagactgaagatgctgccacttattactgtcagcagtggagtagtactccgctcacgttcgggtctgggaccaagctggagatcaaacgg

SEQ ID NO: 337 - DNA, 785 bp, Artificial Sequence
  fusion polynucleotide
aagcttatggattttcaagtgcagattttcagcttcctgctaatcagtgcttcagtcataatgtccagaggagtcgacattgtgctcactcagtctccaacaaccatagctgcatctccaggggagaaggtcaccatcacctgccgtgccagctccagtgtaagttacatgtactggtaccagcagaagtcaggcgcctcccctaaactctggatttatgacacatccaagctggcttctggagttccaaatcgcttcagtggcagtgggtctgggacctcttattctctcgcaatcaacaccatggagactgaagatgctgccacttattactgtcagcagtggagtagtactccgctcacgttcgggtctgggaccaagctggagatcaaacggggtggcggtggctcgggcggtggtgggtcgggtggcggcggatctcaggtgcagctgaaggaggcaggacctggcctggtgcaaccgacacagaccctgtccctcacatgcactgtctctgggttctcattaaccagcgatggtgtacactggattcgacagcctccaggaaagggtctggaatggatgggaataatatattatgatggaggcacagattataattcagcaattaaatccagactgagcatcagcagggacacctccaagagccaagttttcttaaaaatcaacagtctgcaaactgatgacacagccatgtattactgtgccagaatccactttgattactggggccaaggagtcatggtcacagtctcctctgatca

SEQ ID NO: 338 - DNA, 1491 bp, Artificial Sequence
  fusion polynucleotide
aagcttatggattttcaagtgcagattttcagcttcctgctaatcagtgcttcagtcataatgtccagaggagtcgacattgtgctcactcagtctccaacaaccatagctgcatctccaggggagaaggtcaccatcacctgccgtgccagctccagtgtaagttacatgtactggtaccagcagaagtcaggcgcctcccctaaactctggatttatgacacatccaagctggcttctggagttccaaatcgcttcagtggcagtgggtctgggacctcttattctctcgcaatcaacaccatggagactgaagatgctgccacttattactgtcagcagtggagtagtactccgctcacgttcgggtctgggaccaagctggagatcaaacggggtggcggtggctcgggcggtggtgggtcgggtggcggcggatctcaggtgcagctgaaggaggcaggacctggcctggtgcaaccgacacagaccctgtccctcacatgcactgtctctgggttctcattaaccagcgatggtgtacactggattcgacagcctccaggaaagggtctggaatggatgggaataatatattatgatggaggcacagattataattcagcaattaaatccagactgagcatcagcagggacacctccaagagccaagttttcttaaaaatcaacagtctgcaaactgatgacacagccatgtattactgtgccagaatccactttgattactggggccaaggagtcatggtcacagtctcctctgatcaggagcccaaatcttgtgacaaaactcacacatgcccaccgtgcccagcacctgaactcctggggggaccgtcagtcttcctcttccccccaaaacccaaggacaccctcatgatctcccggacccctgaggtcacatgcgtggtggtggacgtgagccacgaagaccctgaggtcaagttcaactggtacgtggacggcgtggaggtgcataatgccaagacaaagccgcgggaggagcagtacaacagcacgtaccgtgtggtcagcgtcctcaccgtcctgcaccaggactggctgaatggcaaggagtacaagtgcaaggtctccaacaaagccctcccagcccccatcgagaaaacaatctccaaagccaaagggcagccccgagaaccacaggtgtacaccctgcccccatcccgggatgagctgaccaagaaccaggtcagcctgacctgcctggtcaaaggcttctatcccagcgacatcgccgtggagtgggagagcaatgggcagccggagaacaactacaagaccacgcctcccgtgctggactccgacggctccttcttcctctacagcaagctcaccgtggacaagagcaggtggcagcaggggaacgtcttctcatgctccgtgatgcatgaggctctgcacaaccactacacgcagaagagcctctccctgtctccgggtaaatgatctaga

SEQ ID NO: 339 - DNA, 1645 bp, Artificial Sequence
  fusion polynucleotide
aagcttatggattttcaagtgcagattttcagcttcctgctaatcagtgcttcagtcataatgtccagaggagtcgacattgtgctcactcagtctccaacaaccatagctgcatctccaggggagaaggtcaccatcacctgccgtgccagctccagtgtaagttacatgtactggtaccagcagaagtcaggcgcctcccctaaactctggatttatgacacatccaagctggcttctggagttccaaatcgcttcagtggcagtgggtctgggacctcttattctctcgcaatcaacaccatggagactgaagatgctgccacttattactgtcagcagtggagtagtactccgctcacgttcgggtctgggaccaagctggagatcaaacggggtggcggtggctcgggcggtggtgggtcgggtggcggcggatctcaggtgcagctgaaggaggcaggacctggcctggtgcaaccgacacagaccctgtccctcacatgcactgtctctgggttctcattaaccagcgatggtgtacactggattcgacagcctccaggaaagggtctggaatggatgggaataatatattatgatggaggcacagattataattcagcaattaaatccagactgagcatcagcagggacacctccaagagccaagttttcttaaaaatcaacagtctgcaaactgatgacacagccatgtattactgtgccagaatccactttgattactggggccaaggagtcatggtcacagtctcctctgatctggagcccaaatcttctgacaaaactcacacaagcccaccgagcccagcacctgaactcctggggggatcgtcagtcttcctcttccccccaaaacccaaggacaccctcatgatctcccggacccctgaggtcacatgcgtggtggtggacgtgagccacgaagaccctgaggtcaagttcaactggtacgtggacggcgtggaggtgcataatgccaagacaaagccgcgggaggagcagtacaacagcacgtaccgtgtggtcagcgtcctcaccgtcctgcaccaggactggctgaatggcaaggagtacaagtgcaaggtctccaacaaagccctcccagcccccatcgagaaaaccatctccaaagccaaagggcagccccgagaaccacaggtgtacaccctgcccccatcccgggatgagctgaccaagaaccaggtcagcctgacctgcctggtcaaaggcttctatcccagcgacatcgccgtggagtgggagagcaatgggcagccggagaacaactacaagaccacgcctcccgtgctggactccgacggctccttcttcctctacagcaagctcaccgtggacaagagcaggtggcagcaggggaacgtcttctcatgctccgtgatgcatgaggctctgcacaaccactacacgcagaagagcctctccctgtctccgggtaaagcggatccttcgaacctgctcccatcctgggccattaccttaatctcagtaaatggaatttttgtgatatgctgcctgacctactgctttgccccaagatgcagagagagaaggaggaatgagagattgagaagggaaagtgtacgccctgtataaatcgata

SEQ ID NO: 340 - DNA, 1645 bp, Artificial Sequence
  fusion polynucleotide
aagcttatggattttcaagtgcagattttcagcttcctgctaatcagtgcttcagtcataatgtccagaggagtcgacattgtgctcactcagtctccaacaaccatagctgcatctccaggggagaaggtcaccatcacctgccgtgccagctccagtgtaagttacatgtactggtaccagcagaagtcaggcgcctcccctaaactctggatttatgacacatccaagctggcttctggagttccaaatcgcttcagtggcagtgggtctgggacctcttattctctcgcaatcaacaccatggagactgaagatgctgccacttattactgtcagcagtggagtagtactccgctcacgttcgggtctgggaccaagctggagatcaaacggggtggcggtggctcgggcggtggtgggtcgggtggcggcggatctcaggtgcagctgaaggaggcaggacctggcctggtgcaaccgacacagaccctgtccctcacatgcactgtctctgggttctcattaaccagcgatggtgtacactggattcgacagcctccaggaaagggtctggaatggatgggaataatatattatgatggaggcacagattataattcagcaattaaatccagactgagcatcagcagggacacctccaagagccaagttttcttaaaaatcaacagtctgcaaactgatgacacagccatgtattactgtgccagaatccactttgattactggggccaaggagtcatggtcacagtctcctctgatctggagcccaaatcttgtgacaaaactcacacatgcccaccgtgcccagcacctgaactcctggggggaccgtcagtcttcctcttccccccaaaacccaaggacaccctcatgatctcccggacccctgaggtcacatgcgtggtggtggacgtgagccacgaagaccctgaggtcaagttcaactggtacgtggacggcgtggaggtgcataatgccaagacaaagccgcgggaggagcagtacaacagcacgtaccgtgtggtcagcgtcctcaccgtcctgcaccaggactggctgaatggcaaggagtacaagtgcaaggtctccaacaaagccctcccagcccccatcgagaaaaccatctccaaagccaaagggcagccccgagaaccacaggtgtacaccctgcccccatcccgggatgagctgaccaagaaccaggtcagcctgacctgcctggtcaaaggcttctatcccagcgacatcgccgtggagtgggagagcaatgggcagccggagaacaactacaagaccacgcctcccgtgctggactccgacggctccttcttcctctacagcaagctcaccgtggacaagagcaggtggcagcaggggaacgtcttctcatgctccgtgatgcatgaggctctgcacaaccactacacgcagaagagcctctccctgtctccgggtaaagcggatccttcgaacctgctcccatcctgggccattaccttaatctcagtaaatggaatttttgtgatatgctgcctgacctactgctttgccccaagatgcagagagagaaggaggaatgagagattgagaagggaaagtgtacgccctgtataaatcgata

SEQ ID NO: 341 - protein, 113 aa, Artificial Sequence
  fusion polypeptide
QVQLKEAGPGLVQPTQTLSLTCTVSGFSLTSDGVHWIRQPPGKGLEWMGIIYYDGGTDYNSAIKSRLSISRDTSKSQVFLKINSLQTDDTAMYYCARIHFDYWGQGVMVTVSS

SEQ ID NO: 342 - protein, 107 aa, Artificial Sequence
  fusion polypeptide
DIVLTQSPTTIAASPGEKVTITCRASSSVSYMYWYQQKSGASPKLWIYDTSKLASGVPNRFSGSGSGTSYSLAINTMETEDAATYYCQQWSSTPLTFGSGTKLEIKR

SEQ ID NO: 343 - protein, 258 aa, Artificial Sequence
  fusion polypeptide
MDFQVQIFSFLLISASVIMSRGVDIVLTQSPTTIAASPGEKVTITCRASSSVSYMYWYQQKSGASPKLWIYDTSKLASGVPNRFSGSGSGTSYSLAINTMETEDAATYYCQQWSSTPLTFGSGTKLEIKRGGGGSGGGGSGGGGSQVQLKEAGPGLVQPTQTLSLTCTVSGFSLTSDGVHWIRQPPGKGLEWMGIIYYDGGTDYNSAIKSRLSISRDTSKSQVFLKINSLQTDDTAMYYCARIHFDYWGQGVMVTVSS

SEQ ID NO: 344 - protein, 492 aa, Artificial Sequence
  fusion polypeptide
MDFQVQIFSFLLISASVIMSRGVDIVLTQSPTTIAASPGEKVTITCRASSSVSYMYWYQQKSGASPKLWIYDTSKLASGVPNRFSGSGSGTSYSLAINTMETEDAATYYCQQWSSTPLTFGSGTKLEIKRGGGGSGGGGSGGGGSQVQLKEAGPGLVQPTQTLSLTCTVSGFSLTSDGVHWIRQPPGKGLEWMGIIYYDGGTDYNSAIKSRLSISRDTSKSQVFLKINSLQTDDTAMYYCARIHFDYWGQGVMVTVSSDQEPKSCDKTHTCPPCPAPELLGGPSVFLFPPKPKDTLMISRTPEVTCVVVDVSHEDPEVKFNWYVDGVEVHNAKTKPREEQYNSTYRVVSVLTVLHQDWLNGKEYKCKVSNKALPAPIEKTISKAKGQPREPQVYTLPPSRDELTKNQVSLTCLVKGFYPSDIAVEWESNGQPENNYKTTPPVLDSDGSFFLYSKLTVDKSRWQQGNVFSCSVMHEALHNHYTQKSLSLSPGK

SEQ ID NO: 345 - protein, 543 aa, Artificial Sequence
  fusion polypeptide
MDFQVQIFSFLLISASVIMSRGVDIVLTQSPTTIAASPGEKVTITCRASSSVSYMYWYQQKSGASPKLWIYDTSKLASGVPNRFSGSGSGTSYSLAINTMETEDAATYYCQQWSSTPLTFGSGTKLEIKRGGGGSGGGGSGGGGSQVQLKEAGPGLVQPTQTLSLTCTVSGFSLTSDGVHWIRQPPGKGLEWMGIIYYDGGTDYNSAIKSRLSISRDTSKSQVFLKINSLQTDDTAMYYCARIHFDYWGQGVMVTVSSDLEPKSCDKTHTCPPCPAPELLGGPSVFLFPPKPKDTLMISRTPEVTCVVVDVSHEDPEVKFNWYVDGVEVHNAKTKPREEQYNSTYRVVSVLTVLHQDWLNGKEYKCKVSNKALPAPIEKTISKAKGQPREPQVYTLPPSRDELTKNQVSLTCLVKGFYPSDIAVEWESNGQPENNYKTTPPVLDSDGSFFLYSKLTVDKSRWQQGNVFSCSVMHEALHNHYTQKSLSLSPGKADPSNLLPSWAITLISVNGIFVICCLTYCFAPRCRERRRNERLRRESVRPV

SEQ ID NO: 346 - protein, 543 aa, Artificial Sequence
  fusion polypeptide
MDFQVQIFSFLLISASVIMSRGVDIVLTQSPTTIAASPGEKVTITCRASSSVSYMYWYQQKSGASPKLWIYDTSKLASGVPNRFSGSGSGTSYSLAINTMETEDAATYYCQQWSSTPLTFGSGTKLEIKRGGGGSGGGGSGGGGSQVQLKEAGPGLVQPTQTLSLTCTVSGFSLTSDGVHWIRQPPGKGLEWMGIIYYDGGTDYNSAIKSRLSISRDTSKSQVFLKINSLQTDDTAMYYCARIHFDYWGQGVMVTVSSDLEPKSSDKTHTSPPSPAPELLGGSSVFLFPPKPKDTLMISRTPEVTCVVVDVSHEDPEVKFNWYVDGVEVHNAKTKPREEQYNSTYRVVSVLTVLHQDWLNGKEYKCKVSNKALPAPIEKTISKAKGQPREPQVYTLPPSRDELTKNQVSLTCLVKGFYPSDIAVEWESNGQPENNYKTTPPVLDSDGSFFLYSKLTVDKSRWQQGNVFSCSVMHEALHNHYTQKSLSLSPGKADPSNLLPSWAITLISVNGIFVICCLTYCFAPRCRERRRNERLRRESVRPV

SEQ ID NO: 347 - DNA, 1527 bp, Artificial Sequence
  fusion polynucleotide
aagcttatggattttcaagtgcagattttcagcttcctgctaatcagtgcttcagtcataatgtccagaggagtcgacatccagatgacacagactacatcctccctgtctgcctctctgggagacagagtcaccatcagttgcagggcaagtcaggacattcgcaattatttaaactggtatcagcagaaaccagatggaactgttaaactcctgatctactacacatcaagattacactcaggagtcccatcaaggttcagtggcagtgggtctggaacagattattctctcaccattgccaacctgcaaccagaagatattgccacttacttttgccaacagggtaatacgcttccgtggacgttcggtggaggcaccaaactggtaaccaaacgggagctcggtggcggtggctcgggcggtggtgggtcgggtggcggcggatctatcgatgaggtccagctgcaacagtctggacctgaactggtgaagcctggagcttcaatgtcctgcaaggcctctggttactcattcactggctacatcgtgaactggctgaagcagagccatggaaagaaccttgagtggattggacttattaatccatacaaaggtcttactacctacaaccagaaattcaagggcaaggccacattaactgtagacaagtcatccagcacagcctacatggagctcctcagtctgacatctgaagactctgcagtctattactgtgcaagatctgggtactatggtgactcggactggtacttcgatgtctggggcgcagggaccacggtcaccgtctcctctgatcaggagcccaaatcttgtgacaaaactcacacatgcccaccgtgcccagcacctgaactcctggggggaccgtcagtcttcctcttccccccaaaacccaaggacaccctcatgatctcccggacccctgaggtcacatgcgtggtggtggacgtgagccacgaagaccctgaggtcaagttcaactggtacgtggacggcgtggaggtgcataatgccaagacaaagccgcgggaggagcagtacaacagcacgtaccgtgtggtcagcgtcctcaccgtcctgcaccaggactggctgaatggcaaggagtacaagtgcaaggtctccaacaaagccctcccagcccccatcgagaaaacaatctccaaagccaaagggcagccccgagaaccacaggtgtacaccctgcccccatcccgggatgagctgaccaagaaccaggtcagcctgacctgcctggtcaaaggcttctatcccagcgacatcgccgtggagtgggagagcaatgggcagccggagaacaactacaagaccacgcctcccgtgctggactccgacggctccttcttcctctacagcaagctcaccgtggacaagagcaggtggcagcaggggaacgtcttctcatgctccgtgatgcatgaggctctgcacaaccactacacgcagaagagcctctccctgtctccgggtaaatgatctaga

SEQ ID NO: 348 - protein, 504 aa, Artificial Sequence
  fusion polypeptide
MDFQVQIFSFLLISASVIMSRGVDIQMTQTTSSLSASLGDRVTISCRASQDIRNYLNWYQQKPDGTVKLLIYYTSRLHSGVPSRFSGSGSGTDYSLTIANLQPEDIATYFCQQGNTLPWTFGGGTKLVTKRELGGGGSGGGGSGGGGSIDEVQLQQSGPELVKPGASMSCKASGYSFTGYIVNWLKQSHGKNLEWIGLINPYKGLTTYNQKFKGKATLTVDKSSSTAYMELLSLTSEDSAVYYCARSGYYGDSDWYFDVWGAGTTVTVSSDQEPKSCDKTHTCPPCPAPELLGGPSVFLFPPKPKDTLMISRTPEVTCVVVDVSHEDPEVKFNWYVDGVEVHNAKTKPREEQYNSTYRVVSVLTVLHQDWLNGKEYKCKVSNKALPAPIEKTISKAKGQPREPQVYTLPPSRDELTKNQVSLTCLVKGFYPSDIAVEWESNGQPENNYKTTPPVLDSDGSFFLYSKLTVDKSRWQQGNVFSCSVMHEALHNHYTQKSLSLSPGK

SEQ ID NO: 349 - DNA, 2325 bp, Artificial Sequence
  fusion polynucleotide
aagcttgccgccatggattttcaagtgcagattttcagcttcctgctaatcagtgcttcagtcataattgccagaggacaaattgttctctcccagtctccagcaatcctgtctgcatctccaggggagaaggtcacaatgacttgcagggccagctcaagtgtaagttacatgcactggtaccagcagaagccaggatcctcccccaaaccctggatttatgccccatccaacctggcttctggagtccctgctcgcttcagtggcagtgggtctgggacctcttactctctcacaatcagcagagtggaggctgaagatgctgccacttattactgccagcagtggagttttaacccacccacgttcggtgctgggaccaagctggagctgaaaggtggcggtggctcgggcggtggtggatctggaggaggtgggagctctcaggcttatctacagcagtctggggctgagctggtgaggcctggggcctcagtgaagatgtcctgcaaggcttctggctacacatttaccagttacaatatgcactgggtaaagcagacacctagacagggcctggaatggattggagctatttatccaggaaatggtgatacttcctacaatcagaagttcaagggcaaggccacactgactgtagacaaatcctccagcacagcctacatgcagctcagcagcctgacatctgaagactctgcggtctatttctgtgcaagagtggtgtactatagtaactcttactggtacttcgatgtctggggcacagggaccacggtcaccgtctcttctgatcaatccaactctgaagaagcaaagaaagaggaggccaaaaaggaggaagccaagaaatctaacagcgtcgacattgttctgactcagtctccagccaccctgtctgtgactccaggagatagagtctctctttcctgcagggccagccagagtattagcgactacttacactggtatcaacaaaaatcacatgagtctccaaggcttctcatcaaatatgcttcccattccatctctgggatcccctccaggttcagtggcagtggatcagggtcagatttcactctcagtatcaacagtgtggaacctgaagatgttggaatttattactgtcaacatggtcacagctttccgtggacgttcggtggaggcaccaagctggaaatcaaacggggtggcggtggctcgggcggaggtgggtcgggtggcggcggatctcagatccagttggtgcaatctggacctgagctgaagaagcctggagagacagtcaggatctcctgcaaggcttctgggtatgccttcacaactactggaatgcagtgggtgcaagagatgccaggaaagggtttgaagtggattggctggataaacaccccactctggagtgccaaaatatgtagaagacttcaaggacggtttgccttctctttggaaacctctgccaacactgcatatttacagataagcaacctcaaagatgaggacacggctacgtatttctgtgtgagatccgggaatggtaactatgacctggcctactttgcttactggggccaagggacactggtcactgtctctgatcaggagcccaaatcttctgacaaaactcacacatccccaccgtccccagcacctgaactcctggggggatcgtcagtcttcctcttccccccaaaacccaaggacaccctcatgatctcccggacccctgaggtcacatgcgtggtggtggacgtgagccacgaagaccctgaggtcaagttcaactggtacgtggacggcgtggaggtgcataatgccaagacaaagccgcgggaggagcagtacaacagcacgtaccgtgtggtcagcgtcctcaccgtcctgcaccaggactggctgaatggcaaggagtacaagtgcaaggtctccaacaaagccctcccagcccccatcgagaaaacaatctccaaagccaaagggcagccccgagaaccacaggtgtacaccctgcccccatcccgggatgagctgaccaagaaccaggtcagcctgacctgcctggtcaaaggcttctatcccagcgacatcgccgtggagtgggagagcaatgggcagccggagaacaactacaagaccacgcctcccgtgctggactccgacggctccttcttcctctacagcaagctcaccgtggacaagagcaggtggcagcaggggaacgtcttctcatgctccgtgatgcatgaggctctgcacaaccactacacgcagaagagcctctccctgtctccgggtaaatgatctaga

SEQ ID NO: 350 - protein, 768 aa, Artificial Sequence
  fusion polypeptide
MDFQVQIFSFLLISASVIIARGQIVLSQSPAILSASPGEKVTMTCRASSSVSYMHWYQQKPGSSPKPWIYAPSNLASGVPARFSGSGSGTSYSLTISRVEAEDAATYYCQQWSFNPPTFGAGTKLELKGGGGSGGGGSGGGGSSQAYLQQSGAELVRPGASVKMSCKASGYTFTSYNMHWVKQTPRQGLEWIGAIYPGNGDTSYNQKFKGKATLTVDKSSSTAYMQLSSLTSEDSAVYFCARVVYYSNSYWYFDVWGTGTTVTVSSDQSNSEEAKKEEAKKEEAKKSNSVDIVLTQSPATLSVTPGDRVSLSCRASQSISDYLHWYQQKSHESPRLLIKYASHSISGIPSRFSGSGSGSDFTLSINSVEPEDVGIYYCQHGHSFPWTFGGGTKLEIKRGGGGSGGGGSGGGGSQIQLVQSGPELKKPGETVRISCKASGYAFTTTGMQWVQEMPGKGLKWIGWINTPLWSAKICRRLQGRFAFSLETSANTAYLQISNLKDEDTATYFCVRSGNGNYDLAYFAYWGQGTLVTVSDQEPKSSDKTHTSPPSPAPELLGGSSVFLFPPKPKDTLMISRTPEVTCVVVDVSHEDPEVKFNWYVDGVEVHNAKTKPREEQYNSTYRVVSVLTVLHQDWLNGKEYKCKVSNKALPAPIEKTISKAKGQPREPQVYTLPPSRDELTKNQVSLTCLVKGFYPSDIAVEWESNGQPENNYKTTPPVLDSDGSFFLYSKLTVDKSRWQQGNVFSCSVMHEALHNHYTQKSLSLSPGK

SEQ ID NO: 351 - DNA, 1521 bp, Artificial Sequence
  fusion polynucleotide
aagcttgccgccatggattttcaagtgcagattttcagcttcctgctaatcagtgcttcagtcataattgccagaggacaaattgttctctcccagtctccagcaatcctgtctgcatctccaggggagaaggtcacaatgacttgcagggccagctcaagtgtaagttacatgcactggtaccagcagaagccaggatcctcccccaaaccctggatttatgccccatccaacctggcttctggagtccctgctcgcttcagtggcagtgggtctgggacctcttactctctcacaatcagcagagtggaggctgaagatgctgccacttattactgccagcagtggagttttaacccacccacgttcggtgctgggaccaagctggagctgaaagatggcggtggctcgggcggtggtggatctggaggaggtgggagctctcaggcttatctacagcagtctggggctgagctggtgaggcctggggcctcagtgaagatgtcctgcaaggcttctggctacacatttaccagttacaatatgcactgggtaaagcagacacctagacagggcctggaatggattggagctatttatccaggaaatggtgatacttcctacaatcagaagttcaagggcaaggccacactgactgtagacaaatcctccagcacagcctacatgcagctcagcagcctgacatctgaagactctgcggtctatttctgtgcaagagtggtgtactatagtaactcttactggtacttcgatgtctggggcacagggaccacggtcaccgtctcttctgatcaggagcccaaatcttctgacaaaactcacacatccccaccgtccccagcacctgaactcctggggggatcgtcagtcttcctcttccccccaaaacccaaggacaccctcatgatctcccggacccctgaggtcacatgcgtggtggtggacgtgagccacgaagaccctgaggtcaagttcaactggtacgtggacggcgtggaggtgcataatgccaagacaaagccgcgggaggagcagtacaacagcacgtaccgtgtggtcagcgtcctcaccgtcctgcaccaggactggctgaatggcaaggagtacaagtgcaaggtctccaacaaagccctcccagcccccatcgagaaaacaatctccaaagccaaagggcagccccgagaaccacaggtgtacaccctgcccccatcccgggatgagctgaccaagaaccaggtcagcctgacctgcctggtcaaaggcttctatcccagcgacatcgccgtggagtgggagagcaatgggcagccggagaacaactacaagaccacgcctcccgtgctggactccgacggctccttcttcctctacagcaagctcaccgtggacaagagcaggtggcagcaggggaacgtcttctcatgctccgtgatgcatgaggctctgcacaaccactacacgcagaagagcctctccctgtctccgggtaaatgatctaga

SEQ ID NO: 352 - protein, 500 aa, Artificial Sequence
  fusion polypeptide
MDFQVQIFSFLLISASVIIARGQIVLSQSPAILSASPGEKVTMTCRASSSVSYMHWYQQKPGSSPKPWIYAPSNLASGVPARFSGSGSGTSYSLTISRVEAEDAATYYCQQWSFNPPTFGAGTKLELKDGGGSGGGGSGGGGSSQAYLQQSGAELVRPGASVKMSCKASGYTFTSYNMHWVKQTPRQGLEWIGAIYPGNGDTSYNQKFKGKATLTVDKSSSTAYMQLSSLTSEDSAVYFCARVVYYSNSYWYFDVWGTGTTVTVSSDQEPKSSDKTHTSPPSPAPELLGGSSVFLFPPKPKDTLMISRTPEVTCVVVDVSHEDPEVKFNWYVDGVEVHNAKTKPREEQYNSTYRVVSVLTVLHQDWLNGKEYKCKVSNKALPAPIEKTISKAKGQPREPQVYTLPPSRDELTKNQVSLTCLVKGFYPSDIAVEWESNGQPENNYKTTPPVLDSDGSFFLYSKLTVDKSRWQQGNVFSCSVMHEALHNHYTQKSLSLSPGK

SEQ ID NO: 353 - DNA, 423 bp, Artificial Sequence
  fusion polynucleotide
atggctgtcttggggctgctcttctgcctggtgacatttccaagctgtgtcctatcccaggtgcagctgaagcagtcaggacctggcctagtgcagtcctcacagagcctgtccatcacctgcacagtctctggtttctcattaactacctatgctgtacactgggttcgccagtctccaggaaagggtctggagtggctgggagtgatatggagtggtggaatcacagactataatgcagctttcatatccagactgagcatcaccaaggacgattccaagagccaagttttctttaaaatgaacagtctgcaacctaatgacacagccatttattactgtgccagaaatgggggtgataactacccttattactatgctatggactactggggtcaaggaacctcagtcaccgtctcctca

SEQ ID NO: 354 - DNA, 366 bp, Artificial Sequence
  fusion polynucleotide
caggtgcagctgaagcagtcaggacctggcctagtgcagtcctcacagagcctgtccatcacctgcacagtctctggtttctcattaactacctatgctgtacactgggttcgccagtctccaggaaagggtctggagtggctgggagtgatatggagtggtggaatcacagactataatgcagctttcatatccagactgagcatcaccaaggacgattccaagagccaagttttctttaaaatgaacagtctgcaacctaatgacacagccatttattactgtgccagaaatgggggtgataactacccttattactatgctatggactactggggtcaaggaacctcagtcaccgtctcctca

SEQ ID NO: 355 - DNA, 399 bp, Artificial Sequence
  fusion polynucleotide
atgaggttctctgctcagcttctggggctgcttgtgctctggatccctggatccactgcagatattgtgatgacgcaggctgcattctccaatccagtcactcttggaacatcagcttccatctcctgcaggtctagtaagagtctcctacatagtaatggcatcacttatttgtattggtatctgcagaagccaggccagtctcctcagctcctgatttatcagatgtccaaccttgcctcaggagtcccagacaggttcagtagcagtgggtcaggaactgatttcacactgagaatcagcagagtggaggctgaggatgtgggtgtttattactgtgctcaaaatctagaacttccgctcacgttcggtgctgggaccaagctggagctgaaacgg

SEQ ID NO: 356 - DNA, 825 bp, Artificial Sequence
  fusion polynucleotide
aagcttgccgccatgaggttctctgctcagcttctggggctgcttgtgctctggatccctggatccactgcagatattgtgatgacgcaggctgcattctccaatccagtcactcttggaacatcagcttccatctcctgcaggtctagtaagagtctcctacatagtaatggcatcacttatttgtattggtatctgcagaagccaggccagtctcctcagctcctgatttatcagatgtccaaccttgcctcaggagtcccagacaggttcagtagcagtgggtcaggaactgatttcacactgagaatcagcagagtggaggctgaggatgtgggtgtttattactgtgctcaaaatctagaacttccgctcacgttcggtgctgggaccaagctggagctgaaacggggtggcggtggctcgggcggtggtgggtcgggtggcggcggatcgtcacaggtgcagctgaagcagtcaggacctggcctagtgcagtcctcacagagcctgtccatcacctgcacagtctctggtttctcattaactacctatgctgtacactgggttcgccagtctccaggaaagggtctggagtggctgggagtgatatggagtggtggaatcacagactataatgcagctttcatatccagactgagcatcaccaaggacgattccaagagccaagttttctttaaaatgaacagtctgcaacctaatgacacagccatttattactgtgccagaaatgggggtgataactacccttattactatgctatggactactggggtcaaggaacctcagtcaccgtctcctct

SEQ ID NO: 357 - DNA, 1536 bp, Artificial Sequence
  fusion polynucleotide
aagcttgccgccatgaggttctctgctcagcttctggggctgcttgtgctctggatccctggatccactgcagatattgtgatgacgcaggctgcattctccaatccagtcactcttggaacatcagcttccatctcctgcaggtctagtaagagtctcctacatagtaatggcatcacttatttgtattggtatctgcagaagccaggccagtctcctcagctcctgatttatcagatgtccaaccttgcctcaggagtcccagacaggttcagtagcagtgggtcaggaactgatttcacactgagaatcagcagagtggaggctgaggatgtgggtgtttattactgtgctcaaaatctagaacttccgctcacgttcggtgctgggaccaagctggagctgaaacggggtggcggtggctcgggcggtggtgggtcgggtggcggcggatcgtcacaggtgcagctgaagcagtcaggacctggcctagtgcagtcctcacagagcctgtccatcacctgcacagtctctggtttctcattaactacctatgctgtacactgggttcgccagtctccaggaaagggtctggagtggctgggagtgatatggagtggtggaatcacagactataatgcagctttcatatccagactgagcatcaccaaggacgattccaagagccaagttttctttaaaatgaacagtctgcaacctaatgacacagccatttattactgtgccagaaatgggggtgataactacccttattactatgctatggactactggggtcaaggaacctcagtcaccgtctcctctgatcaggagcccaaatcttctgacaaaactcacacatccccaccgtccccagcacctgaactcctggggggaccgtcagtcttcctcttccccccaaaacccaaggacaccctcatgatctcccggacccctgaggtcacatgcgtggtggtggacgtgagccacgaagaccctgaggtcaagttcaactggtacgtggacggcgtggaggtgcataatgccaagacaaagccgcgggaggagcagtacaacagcacgtaccgtgtggtcagcgtcctcaccgtcctgcaccaggactggctgaatggcaaggagtacaagtgcaaggtctccaacaaagccctcccagcccccatcgagaaaacaatctccaaagccaaagggcagccccgagaaccacaggtgtacaccctgcccccatcccgggatgagctgaccaagaaccaggtcagcctgacctgcctggtcaaaggcttctatcccagcgacatcgccgtggagtgggagagcaatgggcagccggagaacaactacaagaccacgcctcccgtgctggactccgacggctccttcttcctctacagcaagctcaccgtggacaagagcaggtggcagcaggggaacgtcttctcatgctccgtgatgcatgaggctctgcacaaccactacacgcagaagagcctctccctgtctccgggtaaatgatctaga

SEQ ID NO: 358 - DNA, 1696 bp, Artificial Sequence
  fusion polynucleotide
aagcttgccgccatgaggttctctgctcagcttctggggctgcttgtgctctggatccctggatccactgcagatattgtgatgacgcaggctgcattctccaatccagtcactcttggaacatcagcttccatctcctgcaggtctagtaagagtctcctacatagtaatggcatcacttatttgtattggtatctgcagaagccaggccagtctcctcagctcctgatttatcagatgtccaaccttgcctcaggagtcccagacaggttcagtagcagtgggtcaggaactgatttcacactgagaatcagcagagtggaggctgaggatgtgggtgtttattactgtgctcaaaatctagaacttccgctcacgttcggtgctgggaccaagctggagctgaaacggggtggcggtggctcgggcggtggtgggtcgggtggcggcggatcgtcacaggtgcagctgaagcagtcaggacctggcctagtgcagtcctcacagagcctgtccatcacctgcacagtctctggtttctcattaactacctatgctgtacactgggttcgccagtctccaggaaagggtctggagtggctgggagtgatatggagtggtggaatcacagactataatgcagctttcatatccagactgagcatcaccaaggacgattccaagagccaagttttctttaaaatgaacagtctgcaacctaatgacacagccatttattactgtgccagaaatgggggtgataactacccttattactatgctatggactactggggtcaaggaacctcagtcaccgtctcctctgatctggagcccaaatcttctgacaaaactcacacaagcccaccgagcccagcacctgaactcctggggggatcgtcagtcttcctcttccccccaaaacccaaggacaccctcatgatctcccggacccctgaggtcacatgcgtggtggtggacgtgagccacgaagaccctgaggtcaagttcaactggtacgtggacggcgtggaggtgcataatgccaagacaaagccgcgggaggagcagtacaacagcacgtaccgtgtggtcagcgtcctcaccgtcctgcaccaggactggctgaatggcaaggagtacaagtgcaaggtctccaacaaagccctcccagcccccatcgagaaaaccatctccaaagccaaagggcagccccgagaaccacaggtgtacaccctgcccccatcccgggatgagctgaccaagaaccaggtcagcctgacctgcctggtcaaaggcttctatcccagcgacatcgccgtggagtgggagagcaatgggcagccggagaacaactacaagaccacgcctcccgtgctggactccgacggctccttcttcctctacagcaagctcaccgtggacaagagcaggtggcagcaggggaacgtcttctcatgctccgtgatgcatgaggctctgcacaaccactacacgcagaagagcctctccctgtctccgggtaaagcggatccttcgaacctgctcccatcctgggccattaccttaatctcagtaaatggaatttttgtgatatgctgcctgacctactgctttgccccaagatgcagagagagaaggaggaatgagagattgagaagggaaagtgtacgccctgtataaatcgatactcgag

SEQ ID NO: 359 - protein, 141 aa, Artificial Sequence
  fusion polypeptide
MAVLGLLFCLVTFPSCVLSQVQLKQSGPGLVQSSQSLSITCTVSGFSLTTYAVHWVRQSPGKGLEWLGVIWSGGITDYNAAFISRLSITKDDSKSQVFFKMNSLQPNDTAIYYCARNGGDNYPYYYAMDYWGQGTSVTVSS

SEQ ID NO: 360 - protein, 122 aa, Artificial Sequence
  fusion polypeptide
QVQLKQSGPGLVQSSQSLSITCTVSGFSLTTYAVHWVRQSPGKGLEWLGVIWSGGITDYNAAFISRLSITKDDSKSQVFFKMNSLQPNDTAIYYCARNGGDNYPYYYAMDYWGQGTSVTVSS

SEQ ID NO: 361 - protein, 133 aa, Artificial Sequence
  fusion polypeptide
MRFSAQLLGLLVLWIPGSTADIVMTQAAFSNPVTLGTSASISCRSSKSLLHSNGITYLYWYLQKPGQSPQLLIYQMSNLASGVPDRFSSSGSGTDFTLRISRVEAEDVGVYYCAQNLELPLTFGAGTKLELKR

SEQ ID NO: 362 - protein, 271 aa, Artificial Sequence
  fusion polypeptide
MRFSAQLLGLLVLWIPGSTADIVMTQAAFSNPVTLGTSASISCRSSKSLLHSNGITYLYWYLQKPGQSPQLLIYQMSNLASGVPDRFSSSGSGTDFTLRISRVEAEDVGVYYCAQNLELPLTFGAGTKLELKRGGGGSGGGGSGGGGSSQVQLKQSGPGLVQSSQSLSITCTVSGFSLTTYAVHWVRQSPGKGLEWLGVIWSGGITDYNAAFISRLSITKDDSKSQVFFKMNSLQPNDTAIYYCARNGGDNYPYYYAMDYWGQGTSVTVSS

SEQ ID NO: 363 - protein, 505 aa, Artificial Sequence
  fusion polypeptide
MRFSAQLLGLLVLWIPGSTADIVMTQAAFSNPVTLGTSASISCRSSKSLLHSNGITYLYWYLQKPGQSPQLLIYQMSNLASGVPDRFSSSGSGTDFTLRISRVEAEDVGVYYCAQNLELPLTFGAGTKLELKRGGGGSGGGGSGGGGSSQVQLKQSGPGLVQSSQSLSITCTVSGFSLTTYAVHWVRQSPGKGLEWLGVIWSGGITDYNAAFISRLSITKDDSKSQVFFKMNSLQPNDTAIYYCARNGGDNYPYYYAMDYWGQGTSVTVSSDQEPKSSDKTHTSPPSPAPELLGGPSVFLFPPKPKDTLMISRTPEVTCVVVDVSHEDPEVKFNWYVDGVEVHNAKTKPREEQYNSTYRVVSVLTVLHQDWLNGKEYKCKVSNKALPAPIEKTISKAKGQPREPQVYTLPPSRDELTKNQVSLTCLVKGFYPSDIAVEWESNGQPENNYKTTPPVLDSDGSFFLYSKLTVDKSRWQQGNVFSCSVMHEALHNHYTQKSLSLSPGK

SEQ ID NO: 364 - protein, 556 aa, Artificial Sequence
  fusion polypeptide
MRFSAQLLGLLVLWIPGSTADIVMTQAAFSNPVTLGTSASISCRSSKSLLHSNGITYLYWYLQKPGQSPQLLIYQMSNLASGVPDRFSSSGSGTDFTLRISRVEAEDVGVYYCAQNLELPLTFGAGTKLELKRGGGGSGGGGSGGGGSSQVQLKQSGPGLVQSSQSLSITCTVSGFSLTTYAVHWVRQSPGKGLEWLGVIWSGGITDYNAAFISRLSITKDDSKSQVFFKMNSLQPNDTAIYYCARNGGDNYPYYYAMDYWGQGTSVTVSSDLEPKSSDKTHTSPPSPAPELLGGSSVFLFPPKPKDTLMISRTPEVTCVVVDVSHEDPEVKFNWYVDGVEVHNAKTKPREEQYNSTYRVVSVLTVLHQDWLNGKEYKCKVSNKALPAPIEKTISKAKGQPREPQVYTLPPSRDELTKNQVSLTCLVKGFYPSDIAVEWESNGQPENNYKTTPPVLDSDGSFFLYSKLTVDKSRWQQGNVFSCSVMHEALHNHYTQKSLSLSPGKADPSNLLPSWAITLISVNGIFVICCLTYCFAPRCRERRRNERLRRESVRPV

SEQ ID NO: 365 - DNA, 72 bp, Artificial Sequence
  3' oligo to introduce  mutation in CH3 at position 405 XX to Y
gttgttgaagacgttcccctgctgccacctgctcttgtccacggtgagcttgctgtagaggtagaaggagcc

SEQ ID NO: 366 - DNA, 72 bp, Artificial Sequence
  3' oligo to introduce  mutation in CH3 at position 405 XX to A
gttgttgaagacgttcccctgctgccacctgctcttgtccacggtgagcttgctgtagagggcgaaggagcc

SEQ ID NO: 367 - DNA, 72 bp, Artificial Sequence
  3' oligo to introduce  mutation in CH3 at position 407 XX to A
gttgttgaagacgttcccctgctgccacctgctcttgtccacggtgagcttgctggcgaggaagaaggagcc

SEQ ID NO: 368 - DNA, 72 bp, Artificial Sequence
  3' oligo to introduce  mutation in CH3 at position 405 XX to Y and 407 to A
gttgttgaagacgttcccctgctgccacctgctcttgtccacggtgagcttgctggcgaggtagaaggagcc

SEQ ID NO: 369 - DNA, 72 bp, Artificial Sequence
  3' oligo to introduce  mutation in CH3 at position 405 XX to A and 407 to Y
gttgttgaagacgttcccctgctgccacctgctcttgtccacggtgagcttgctggcgagggcgaaggagcc

SEQ ID NO: 370 - DNA, 324 bp, Artificial Sequence
  fusion polynucleotide
gggcagccccgagaaccacaggtgtacaccctgcccccatcccgggaggagatgaccaagaaccaggtcagcctgacctgcctggtcaaaggcttctatcccagcgacatcgccgtggagtgggagagcaatgggcagccggagaacaactacaagaccacgcctcccgtgctggactccgacggctccttctacctctatagcaagctcaccgtggacaagagcaggtggcagcaggggaacgtcttctcatgctccgtgatgcatgaggctctgcacaaccactacacgcagaagagcctctccctgtccccgggtaaatga

SEQ ID NO: 371 - DNA, 324 bp, Artificial Sequence
  fusion polynucleotide
gggcagccccgagaaccacaggtgtacaccctgcccccatcccgggaggagatgaccaagaaccaggtcagcctgacctgcctggtcaaaggcttctatcccagcgacatcgccgtggagtgggagagcaatgggcagccggagaacaactacaagaccacgcctcccgtgctggactccgacggctccttcgccctctatagcaagctcaccgtggacaagagcaggtggcagcaggggaacgtcttctcatgctccgtgatgcatgaggctctgcacaaccactacacgcagaagagcctctccctgtccccgggtaaatga

SEQ ID NO: 372 - DNA, 324 bp, Artificial Sequence
  fusion polynucleotide
gggcagccccgagaaccacaggtgtacaccctgcccccatcccgggaggagatgaccaagaaccaggtcagcctgacctgcctggtcaaaggcttctatcccagcgacatcgccgtggagtgggagagcaatgggcagccggagaacaactacaagaccacgcctcccgtgctggactccgacggctccttcttcctcgccagcaagctcaccgtggacaagagcaggtggcagcaggggaacgtcttctcatgctccgtgatgcatgaggctctgcacaaccactacacgcagaagagcctctccctgtccccgggtaaatga

SEQ ID NO: 373 - DNA, 324 bp, Artificial Sequence
  fusion polynucleotide
gggcagccccgagaaccacaggtgtacaccctgcccccatcccgggaggagatgaccaagaaccaggtcagcctgacctgcctggtcaaaggcttctatcccagcgacatcgccgtggagtgggagagcaatgggcagccggagaacaactacaagaccacgcctcccgtgctggactccgacggctccttctacctcgccagcaagctcaccgtggacaagagcaggtggcagcaggggaacgtcttctcatgctccgtgatgcatgaggctctgcacaaccactacacgcagaagagcctctccctgtccccgggtaaatga

SEQ ID NO: 374 - DNA, 324 bp, Artificial Sequence
  fusion polynucleotide
gggcagccccgagaaccacaggtgtacaccctgcccccatcccgggaggagatgaccaagaaccaggtcagcctgacctgcctggtcaaaggcttctatcccagcgacatcgccgtggagtgggagagcaatgggcagccggagaacaactacaagaccacgcctcccgtgctggactccgacggctccttcgccctcgccagcaagctcaccgtggacaagagcaggtggcagcaggggaacgtcttctcatgctccgtgatgcatgaggctctgcacaaccactacacgcagaagagcctctccctgtccccgggtaaatga

SEQ ID NO: 375 - protein, 107 aa, Artificial Sequence
  fusion polypeptide
GQPREPQVYTLPPSREEMTKNQVSLTCLVKGFYPSDIAVEWESNGQPENNYKTTPPVLDSDGSFYLYSKLTVDKSRWQQGNVFSCSVMHEALHNHYTQKSLSLSPGK

SEQ ID NO: 376 - protein, 107 aa, Artificial Sequence
  fusion polypeptide
GQPREPQVYTLPPSREEMTKNQVSLTCLVKGFYPSDIAVEWESNGQPENNYKTTPPVLDSDGSFALYSKLTVDKSRWQQGNVFSCSVMHEALHNHYTQKSLSLSPGK

SEQ ID NO: 377 - protein, 107 aa, Artificial Sequence
  fusion polypeptide
GQPREPQVYTLPPSREEMTKNQVSLTCLVKGFYPSDIAVEWESNGQPENNYKTTPPVLDSDGSFFLASKLTVDKSRWQQGNVFSCSVMHEALHNHYTQKSLSLSPGK

SEQ ID NO: 378 - protein, 107 aa, Artificial Sequence
  fusion polypeptide
GQPREPQVYTLPPSREEMTKNQVSLTCLVKGFYPSDIAVEWESNGQPENNYKTTPPVLDSDGSFYLASKLTVDKSRWQQGNVFSCSVMHEALHNHYTQKSLSLSPGK

SEQ ID NO: 379 - protein, 107 aa, Artificial Sequence
  fusion polypeptide
GQPREPQVYTLPPSREEMTKNQVSLTCLVKGFYPSDIAVEWESNGQPENNYKTTPPVLDSDGSFALASKLTVDKSRWQQGNVFSCSVMHEALHNHYTQKSLSLSPGK

SEQ ID NO: 380 - DNA, 1515 bp, Artificial Sequence
  fusion polynucleotide
aagcttgccgccatggattttcaagtgcagattttcagcttcctgctaatcagtgcttcagtcataattgccagaggacaaattgttctctcccagtctccagcaatcctgtctgcatctccaggggagaaggtcacaatgacttgcagggccagctcaagtgtaagttacatgcactggtaccagcagaagccaggatcctcccccaaaccctggatttatgccccatccaacctggcttctggagtccctgctcgcttcagtggcagtgggtctgggacctcttactctctcacaatcagcagagtggaggctgaagatgctgccacttattactgccagcagtggagttttaacccacccacgttcggtgctgggaccaagctggagctgaaagatggcggtggctcgggcggtggtggatctggaggaggtgggagctctcaggcttatctacagcagtctggggctgagctggtgaggcctggggcctcagtgaagatgtcctgcaaggcttctggctacacatttaccagttacaatatgcactgggtaaagcagacacctagacagggcctggaatggattggagctatttatccaggaaatggtgatacttcctacaatcagaagttcaagggcaaggccacactgactgtagacaaatcctccagcacagcctacatgcagctcagcagcctgacatctgaagactctgcggtctatttctgtgcaagagtggtgtactatagtaactcttactggtacttcgatgtctggggcacagggaccacggtcaccgtctcttctgatcaggagcccaaatcttctgacaaaactcacacatccccaccgtccccagcacctgaactcctggggggaccgtcagtcttcctcttccccccaaaacccaaggacaccctcatgatctcccggacccctgaggtcacatgcgtggtggtggacgtgagccacgaagaccctgaggtcaagttcaactggtacgtggacggcgtggaggtgcataatgccaagacaaagccgcgggaggagcagtacaacagcacgtaccgtgtggtcagcgtcctcaccgtcctgcaccaggactggctgaatggcaaggagtacaagtgcaaggtctccaacaaagccctcccagcccccatcgagaaaacaatctccaaagccaaagggcagccccgagaaccacaggtgtacaccctgcccccatcccgggaggagatgaccaagaaccaggtcagcctgacctgcctggtcaaaggcttctatcccagcgacatcgccgtggagtgggagagcaatgggcagccggagaacaactacaagaccacgcctcccgtgctggactccgacggctccttcgccctctatagcaagctcaccgtggacaagagcaggtggcagcaggggaacgtcttctcatgctccgtgatgcatgaggctctgcacaaccactacacgcagaagagcctctccctgtccccgggtaaatga

SEQ ID NO: 381 - DNA, 1521 bp, Artificial Sequence
  fusion polynucleotide
aagcttgccgccatggattttcaagtgcagattttcagcttcctgctaatcagtgcttcagtcataattgccagaggacaaattgttctctcccagtctccagcaatcctgtctgcatctccaggggagaaggtcacaatgacttgcagggccagctcaagtgtaagttacatgcactggtaccagcagaagccaggatcctcccccaaaccctggatttatgccccatccaacctggcttctggagtccctgctcgcttcagtggcagtgggtctgggacctcttactctctcacaatcagcagagtggaggctgaagatgctgccacttattactgccagcagtggagttttaacccacccacgttcggtgctgggaccaagctggagctgaaagatggcggtggctcgggcggtggtggatctggaggaggtgggagctctcaggcttatctacagcagtctggggctgagctggtgaggcctggggcctcagtgaagatgtcctgcaaggcttctggctacacatttaccagttacaatatgcactgggtaaagcagacacctagacagggcctggaatggattggagctatttatccaggaaatggtgatacttcctacaatcagaagttcaagggcaaggccacactgactgtagacaaatcctccagcacagcctacatgcagctcagcagcctgacatctgaagactctgcggtctatttctgtgcaagagtggtgtactatagtaactcttactggtacttcgatgtctggggcacagggaccacggtcaccgtctcttctgatcaggagcccaaatcttctgacaaaactcacacatccccaccgtccccagcacctgaactcctggggggaccgtcagtcttcctcttccccccaaaacccaaggacaccctcatgatctcccggacccctgaggtcacatgcgtggtggtggacgtgagccacgaagaccctgaggtcaagttcaactggtacgtggacggcgtggaggtgcataatgccaagacaaagccgcgggaggagcagtacaacagcacgtaccgtgtggtcagcgtcctcaccgtcctgcaccaggactggctgaatggcaaggagtacaagtgcaaggtctccaacaaagccctcccagcccccatcgagaaaacaatctccaaagccaaagggcagccccgagaaccacaggtgtacaccctgcccccatcccgggaggagatgaccaagaaccaggtcagcctgacctgcctggtcaaaggcttctatcccagcgacatcgccgtggagtgggagagcaatgggcagccggagaacaactacaagaccacgcctcccgtgctggactccgacggctccttctacctctatagcaagctcaccgtggacaagagcaggtggcagcaggggaacgtcttctcatgctccgtgatgcatgaggctctgcacaaccactacacgcagaagagcctctccctgtccccgggtaaatgatctaga

SEQ ID NO: 382 - DNA, 1515 bp, Artificial Sequence
  fusion polynucleotide
aagcttgccgccatggattttcaagtgcagattttcagcttcctgctaatcagtgcttcagtcataattgccagaggacaaattgttctctcccagtctccagcaatcctgtctgcatctccaggggagaaggtcacaatgacttgcagggccagctcaagtgtaagttacatgcactggtaccagcagaagccaggatcctcccccaaaccctggatttatgccccatccaacctggcttctggagtccctgctcgcttcagtggcagtgggtctgggacctcttactctctcacaatcagcagagtggaggctgaagatgctgccacttattactgccagcagtggagttttaacccacccacgttcggtgctgggaccaagctggagctgaaagatggcggtggctcgggcggtggtggatctggaggaggtgggagctctcaggcttatctacagcagtctggggctgagctggtgaggcctggggcctcagtgaagatgtcctgcaaggcttctggctacacatttaccagttacaatatgcactgggtaaagcagacacctagacagggcctggaatggattggagctatttatccaggaaatggtgatacttcctacaatcagaagttcaagggcaaggccacactgactgtagacaaatcctccagcacagcctacatgcagctcagcagcctgacatctgaagactctgcggtctatttctgtgcaagagtggtgtactatagtaactcttactggtacttcgatgtctggggcacagggaccacggtcaccgtctcttctgatcaggagcccaaatcttctgacaaaactcacacatccccaccgtccccagcacctgaactcctggggggaccgtcagtcttcctcttccccccaaaacccaaggacaccctcatgatctcccggacccctgaggtcacatgcgtggtggtggacgtgagccacgaagaccctgaggtcaagttcaactggtacgtggacggcgtggaggtgcataatgccaagacaaagccgcgggaggagcagtacaacagcacgtaccgtgtggtcagcgtcctcaccgtcctgcaccaggactggctgaatggcaaggagtacaagtgcaaggtctccaacaaagccctcccagcccccatcgagaaaacaatctccaaagccaaagggcagccccgagaaccacaggtgtacaccctgcccccatcccgggaggagatgaccaagaaccaggtcagcctgacctgcctggtcaaaggcttctatcccagcgacatcgccgtggagtgggagagcaatgggcagccggagaacaactacaagaccacgcctcccgtgctggactccgacggctccttcttcctcgccagcaagctcaccgtggacaagagcaggtggcagcaggggaacgtcttctcatgctccgtgatgcatgaggctctgcacaaccactacacgcagaagagcctctccctgtccccgggtaaatga

SEQ ID NO: 383 - DNA, 1515 bp, Artificial Sequence
  fusion polynucleotide
aagcttgccgccatggattttcaagtgcagattttcagcttcctgctaatcagtgcttcagtcataattgccagaggacaaattgttctctcccagtctccagcaatcctgtctgcatctccaggggagaaggtcacaatgacttgcagggccagctcaagtgtaagttacatgcactggtaccagcagaagccaggatcctcccccaaaccctggatttatgccccatccaacctggcttctggagtccctgctcgcttcagtggcagtgggtctgggacctcttactctctcacaatcagcagagtggaggctgaagatgctgccacttattactgccagcagtggagttttaacccacccacgttcggtgctgggaccaagctggagctgaaagatggcggtggctcgggcggtggtggatctggaggaggtgggagctctcaggcttatctacagcagtctggggctgagctggtgaggcctggggcctcagtgaagatgtcctgcaaggcttctggctacacatttaccagttacaatatgcactgggtaaagcagacacctagacagggcctggaatggattggagctatttatccaggaaatggtgatacttcctacaatcagaagttcaagggcaaggccacactgactgtagacaaatcctccagcacagcctacatgcagctcagcagcctgacatctgaagactctgcggtctatttctgtgcaagagtggtgtactatagtaactcttactggtacttcgatgtctggggcacagggaccacggtcaccgtctcttctgatcaggagcccaaatcttctgacaaaactcacacatccccaccgtccccagcacctgaactcctggggggaccgtcagtcttcctcttccccccaaaacccaaggacaccctcatgatctcccggacccctgaggtcacatgcgtggtggtggacgtgagccacgaagaccctgaggtcaagttcaactggtacgtggacggcgtggaggtgcataatgccaagacaaagccgcgggaggagcagtacaacagcacgtaccgtgtggtcagcgtcctcaccgtcctgcaccaggactggctgaatggcaaggagtacaagtgcaaggtctccaacaaagccctcccagcccccatcgagaaaacaatctccaaagccaaagggcagccccgagaaccacaggtgtacaccctgcccccatcccgggaggagatgaccaagaaccaggtcagcctgacctgcctggtcaaaggcttctatcccagcgacatcgccgtggagtgggagagcaatgggcagccggagaacaactacaagaccacgcctcccgtgctggactccgacggctccttctacctcgccagcaagctcaccgtggacaagagcaggtggcagcaggggaacgtcttctcatgctccgtgatgcatgaggctctgcacaaccactacacgcagaagagcctctccctgtccccgggtaaatga

SEQ ID NO: 384 - DNA, 1515 bp, Artificial Sequence
  fusion polynucleotide
aagcttgccgccatggattttcaagtgcagattttcagcttcctgctaatcagtgcttcagtcataattgccagaggacaaattgttctctcccagtctccagcaatcctgtctgcatctccaggggagaaggtcacaatgacttgcagggccagctcaagtgtaagttacatgcactggtaccagcagaagccaggatcctcccccaaaccctggatttatgccccatccaacctggcttctggagtccctgctcgcttcagtggcagtgggtctgggacctcttactctctcacaatcagcagagtggaggctgaagatgctgccacttattactgccagcagtggagttttaacccacccacgttcggtgctgggaccaagctggagctgaaagatggcggtggctcgggcggtggtggatctggaggaggtgggagctctcaggcttatctacagcagtctggggctgagctggtgaggcctggggcctcagtgaagatgtcctgcaaggcttctggctacacatttaccagttacaatatgcactgggtaaagcagacacctagacagggcctggaatggattggagctatttatccaggaaatggtgatacttcctacaatcagaagttcaagggcaaggccacactgactgtagacaaatcctccagcacagcctacatgcagctcagcagcctgacatctgaagactctgcggtctatttctgtgcaagagtggtgtactatagtaactcttactggtacttcgatgtctggggcacagggaccacggtcaccgtctcttctgatcaggagcccaaatcttctgacaaaactcacacatccccaccgtccccagcacctgaactcctggggggaccgtcagtcttcctcttccccccaaaacccaaggacaccctcatgatctcccggacccctgaggtcacatgcgtggtggtggacgtgagccacgaagaccctgaggtcaagttcaactggtacgtggacggcgtggaggtgcataatgccaagacaaagccgcgggaggagcagtacaacagcacgtaccgtgtggtcagcgtcctcaccgtcctgcaccaggactggctgaatggcaaggagtacaagtgcaaggtctccaacaaagccctcccagcccccatcgagaaaacaatctccaaagccaaagggcagccccgagaaccacaggtgtacaccctgcccccatcccgggaggagatgaccaagaaccaggtcagcctgacctgcctggtcaaaggcttctatcccagcgacatcgccgtggagtgggagagcaatgggcagccggagaacaactacaagaccacgcctcccgtgctggactccgacggctccttcgccctcgccagcaagctcaccgtggacaagagcaggtggcagcaggggaacgtcttctcatgctccgtgatgcatgaggctctgcacaaccactacacgcagaagagcctctccctgtccccgggtaaatga

SEQ ID NO: 385 - protein, 500 aa, Artificial Sequence
  fusion polypeptide
MDFQVQIFSFLLISASVIIARGQIVLSQSPAILSASPGEKVTMTCRASSSVSYMHWYQQKPGSSPKPWIYAPSNLASGVPARFSGSGSGTSYSLTISRVEAEDAATYYCQQWSFNPPTFGAGTKLELKDGGGSGGGGSGGGGSSQAYLQQSGAELVRPGASVKMSCKASGYTFTSYNMHWVKQTPRQGLEWIGAIYPGNGDTSYNQKFKGKATLTVDKSSSTAYMQLSSLTSEDSAVYFCARVVYYSNSYWYFDVWGTGTTVTVSSDQEPKSSDKTHTSPPSPAPELLGGPSVFLFPPKPKDTLMISRTPEVTCVVVDVSHEDPEVKFNWYVDGVEVHNAKTKPREEQYNSTYRVVSVLTVLHQDWLNGKEYKCKVSNKALPAPIEKTISKAKGQPREPQVYTLPPSREEMTKNQVSLTCLVKGFYPSDIAVEWESNGQPENNYKTTPPVLDSDGSFALYSKLTVDKSRWQQGNVFSCSVMHEALHNHYTQKSLSLSPGK

SEQ ID NO: 386 - protein, 500 aa, Artificial Sequence
  fusion polypeptide
MDFQVQIFSFLLISASVIIARGQIVLSQSPAILSASPGEKVTMTCRASSSVSYMHWYQQKPGSSPKPWIYAPSNLASGVPARFSGSGSGTSYSLTISRVEAEDAATYYCQQWSFNPPTFGAGTKLELKDGGGSGGGGSGGGGSSQAYLQQSGAELVRPGASVKMSCKASGYTFTSYNMHWVKQTPRQGLEWIGAIYPGNGDTSYNQKFKGKATLTVDKSSSTAYMQLSSLTSEDSAVYFCARVVYYSNSYWYFDVWGTGTTVTVSSDQEPKSSDKTHTSPPSPAPELLGGPSVFLFPPKPKDTLMISRTPEVTCVVVDVSHEDPEVKFNWYVDGVEVHNAKTKPREEQYNSTYRVVSVLTVLHQDWLNGKEYKCKVSNKALPAPIEKTISKAKGQPREPQVYTLPPSREEMTKNQVSLTCLVKGFYPSDIAVEWESNGQPENNYKTTPPVLDSDGSFYLYSKLTVDKSRWQQGNVFSCSVMHEALHNHYTQKSLSLSPGK

SEQ ID NO: 387 - protein, 500 aa, Artificial Sequence
  fusion polypeptide
MDFQVQIFSFLLISASVIIARGQIVLSQSPAILSASPGEKVTMTCRASSSVSYMHWYQQKPGSSPKPWIYAPSNLASGVPARFSGSGSGTSYSLTISRVEAEDAATYYCQQWSFNPPTFGAGTKLELKDGGGSGGGGSGGGGSSQAYLQQSGAELVRPGASVKMSCKASGYTFTSYNMHWVKQTPRQGLEWIGAIYPGNGDTSYNQKFKGKATLTVDKSSSTAYMQLSSLTSEDSAVYFCARVVYYSNSYWYFDVWGTGTTVTVSSDQEPKSSDKTHTSPPSPAPELLGGPSVFLFPPKPKDTLMISRTPEVTCVVVDVSHEDPEVKFNWYVDGVEVHNAKTKPREEQYNSTYRVVSVLTVLHQDWLNGKEYKCKVSNKALPAPIEKTISKAKGQPREPQVYTLPPSREEMTKNQVSLTCLVKGFYPSDIAVEWESNGQPENNYKTTPPVLDSDGSFFLASKLTVDKSRWQQGNVFSCSVMHEALHNHYTQKSLSLSPGK

SEQ ID NO: 388 - protein, 500 aa, Artificial Sequence
  fusion polypeptide
MDFQVQIFSFLLISASVIIARGQIVLSQSPAILSASPGEKVTMTCRASSSVSYMHWYQQKPGSSPKPWIYAPSNLASGVPARFSGSGSGTSYSLTISRVEAEDAATYYCQQWSFNPPTFGAGTKLELKDGGGSGGGGSGGGGSSQAYLQQSGAELVRPGASVKMSCKASGYTFTSYNMHWVKQTPRQGLEWIGAIYPGNGDTSYNQKFKGKATLTVDKSSSTAYMQLSSLTSEDSAVYFCARVVYYSNSYWYFDVWGTGTTVTVSSDQEPKSSDKTHTSPPSPAPELLGGPSVFLFPPKPKDTLMISRTPEVTCVVVDVSHEDPEVKFNWYVDGVEVHNAKTKPREEQYNSTYRVVSVLTVLHQDWLNGKEYKCKVSNKALPAPIEKTISKAKGQPREPQVYTLPPSREEMTKNQVSLTCLVKGFYPSDIAVEWESNGQPENNYKTTPPVLDSDGSFYLASKLTVDKSRWQQGNVFSCSVMHEALHNHYTQKSLSLSPGK

SEQ ID NO: 389 - protein, 500 aa, Artificial Sequence
  fusion polypeptide
MDFQVQIFSFLLISASVIIARGQIVLSQSPAILSASPGEKVTMTCRASSSVSYMHWYQQKPGSSPKPWIYAPSNLASGVPARFSGSGSGTSYSLTISRVEAEDAATYYCQQWSFNPPTFGAGTKLELKDGGGSGGGGSGGGGSSQAYLQQSGAELVRPGASVKMSCKASGYTFTSYNMHWVKQTPRQGLEWIGAIYPGNGDTSYNQKFKGKATLTVDKSSSTAYMQLSSLTSEDSAVYFCARVVYYSNSYWYFDVWGTGTTVTVSSDQEPKSSDKTHTSPPSPAPELLGGPSVFLFPPKPKDTLMISRTPEVTCVVVDVSHEDPEVKFNWYVDGVEVHNAKTKPREEQYNSTYRVVSVLTVLHQDWLNGKEYKCKVSNKALPAPIEKTISKAKGQPREPQVYTLPPSREEMTKNQVSLTCLVKGFYPSDIAVEWESNGQPENNYKTTPPVLDSDGSFALASKLTVDKSRWQQGNVFSCSVMHEALHNHYTQKSLSLSPGK

SEQ ID NO: 390 - DNA, 44 bp, Artificial Sequence
  5' oligo to mutat IgG1
gttgttgatcaggagcccaaatcttctgacaaaactcacacatg

SEQ ID NO: 391 - DNA, 54 bp, Artificial Sequence
  5' oligo to mutate IgG1
gttgttgatcaggagcccaaatcttgtgacaaaactcacacatctccaccgtgc

SEQ ID NO: 392 - DNA, 63 bp, Artificial Sequence
  5' oligo to mutate IgG1
gttgttgatcaggagcccaaatcttgtgacaaaactcacacatgtccaccgtccccagcacct

SEQ ID NO: 393 - DNA, 1521 bp, Artificial Sequence
  fusion polynucleotide
aagcttgccgccatggattttcaagtgcagattttcagcttcctgctaatcagtgcttcagtcataattgccagaggacaaattgttctctcccagtctccagcaatcctgtctgcatctccaggggagaaggtcacaatgacttgcagggccagctcaagtgtaagttacatgcactggtaccagcagaagccaggatcctcccccaaaccctggatttatgccccatccaacctggcttctggagtccctgctcgcttcagtggcagtgggtctgggacctcttactctctcacaatcagcagagtggaggctgaagatgctgccacttattactgccagcagtggagttttaacccacccacgttcggtgctgggaccaagctggagctgaaagatggcggtggctcgggcggtggtggatctggaggaggtgggagctctcaggcttatctacagcagtctggggctgagctggtgaggcctggggcctcagtgaagatgtcctgcaaggcttctggctacacatttaccagttacaatatgcactgggtaaagcagacacctagacagggcctggaatggattggagctatttatccaggaaatggtgatacttcctacaatcagaagttcaagggcaaggccacactgactgtagacaaatcctccagcacagcctacatgcagctcagcagcctgacatctgaagactctgcggtctatttctgtgcaagagtggtgtactatagtaactcttactggtacttcgatgtctggggcacagggaccacggtcaccgtctcttctgatcaggagcccaaatcttctgacaaaactcacacatgcccaccgtgcccagcacctgaactcctggggggaccgtcagtcttcctcttccccccaaaacccaaggacaccctcatgatctcccggacccctgaggtcacatgcgtggtggtggacgtgagccacgaagaccctgaggtcaagttcaactggtacgtggacggcgtggaggtgcataatgccaagacaaagccgcgggaggagcagtacaacagcacgtaccgtgtggtcagcgtcctcaccgtcctgcaccaggactggctgaatggcaaggagtacaagtgcaaggtctccaacaaagccctcccagcccccatcgagaaaacaatctccaaagccaaagggcagccccgagaaccacaggtgtacaccctgcccccatcccgggatgagctgaccaagaaccaggtcagcctgacctgcctggtcaaaggcttctatcccagcgacatcgccgtggagtgggagagcaatgggcagccggagaacaactacaagaccacgcctcccgtgctggactccgacggctccttcttcctctacagcaagctcaccgtggacaagagcaggtggcagcaggggaacgtcttctcatgctccgtgatgcatgaggctctgcacaaccactacacgcagaagagcctctccctgtctccgggtaaatgatctaga

SEQ ID NO: 394 - DNA, 1521 bp, Artificial Sequence
  fusion polynucleotide
aagcttgccgccatggattttcaagtgcagattttcagcttcctgctaatcagtgcttcagtcataattgccagaggacaaattgttctctcccagtctccagcaatcctgtctgcatctccaggggagaaggtcacaatgacttgcagggccagctcaagtgtaagttacatgcactggtaccagcagaagccaggatcctcccccaaaccctggatttatgccccatccaacctggcttctggagtccctgctcgcttcagtggcagtgggtctgggacctcttactctctcacaatcagcagagtggaggctgaagatgctgccacttattactgccagcagtggagttttaacccacccacgttcggtgctgggaccaagctggagctgaaagatggcggtggctcgggcggtggtggatctggaggaggtgggagctctcaggcttatctacagcagtctggggctgagctggtgaggcctggggcctcagtgaagatgtcctgcaaggcttctggctacacatttaccagttacaatatgcactgggtaaagcagacacctagacagggcctggaatggattggagctatttatccaggaaatggtgatacttcctacaatcagaagttcaagggcaaggccacactgactgtagacaaatcctccagcacagcctacatgcagctcagcagcctgacatctgaagactctgcggtctatttctgtgcaagagtggtgtactatagtaactcttactggtacttcgatgtctggggcacagggaccacggtcaccgtctcttctgatcaggagcccaaatcttgtgacaaaactcacacatctccaccgtgcccagcacctgaactcctggggggaccgtcagtcttcctcttccccccaaaacccaaggacaccctcatgatctcccggacccctgaggtcacatgcgtggtggtggacgtgagccacgaagaccctgaggtcaagttcaactggtacgtggacggcgtggaggtgcataatgccaagacaaagccgcgggaggagcagtacaacagcacgtaccgtgtggtcagcgtcctcaccgtcctgcaccaggactggctgaatggcaaggagtacaagtgcaaggtctccaacaaagccctcccagcccccatcgagaaaacaatctccaaagccaaagggcagccccgagaaccacaggtgtacaccctgcccccatcccgggatgagctgaccaagaaccaggtcagcctgacctgcctggtcaaaggcttctatcccagcgacatcgccgtggagtgggagagcaatgggcagccggagaacaactacaagaccacgcctcccgtgctggactccgacggctccttcttcctctacagcaagctcaccgtggacaagagcaggtggcagcaggggaacgtcttctcatgctccgtgatgcatgaggctctgcacaaccactacacgcagaagagcctctccctgtctccgggtaaatgatctaga

SEQ ID NO: 395 - DNA, 1521 bp, Artificial Sequence
  fusion polynucleotide
aagcttgccgccatggattttcaagtgcagattttcagcttcctgctaatcagtgcttcagtcataattgccagaggacaaattgttctctcccagtctccagcaatcctgtctgcatctccaggggagaaggtcacaatgacttgcagggccagctcaagtgtaagttacatgcactggtaccagcagaagccaggatcctcccccaaaccctggatttatgccccatccaacctggcttctggagtccctgctcgcttcagtggcagtgggtctgggacctcttactctctcacaatcagcagagtggaggctgaagatgctgccacttattactgccagcagtggagttttaacccacccacgttcggtgctgggaccaagctggagctgaaagatggcggtggctcgggcggtggtggatctggaggaggtgggagctctcaggcttatctacagcagtctggggctgagctggtgaggcctggggcctcagtgaagatgtcctgcaaggcttctggctacacatttaccagttacaatatgcactgggtaaagcagacacctagacagggcctggaatggattggagctatttatccaggaaatggtgatacttcctacaatcagaagttcaagggcaaggccacactgactgtagacaaatcctccagcacagcctacatgcagctcagcagcctgacatctgaagactctgcggtctatttctgtgcaagagtggtgtactatagtaactcttactggtacttcgatgtctggggcacagggaccacggtcaccgtctcttctgatcaggagcccaaatcttgtgacaaaactcacacatgtccaccgtccccagcacctgaactcctggggggaccgtcagtcttcctcttccccccaaaacccaaggacaccctcatgatctcccggacccctgaggtcacatgcgtggtggtggacgtgagccacgaagaccctgaggtcaagttcaactggtacgtggacggcgtggaggtgcataatgccaagacaaagccgcgggaggagcagtacaacagcacgtaccgtgtggtcagcgtcctcaccgtcctgcaccaggactggctgaatggcaaggagtacaagtgcaaggtctccaacaaagccctcccagcccccatcgagaaaacaatctccaaagccaaagggcagccccgagaaccacaggtgtacaccctgcccccatcccgggatgagctgaccaagaaccaggtcagcctgacctgcctggtcaaaggcttctatcccagcgacatcgccgtggagtgggagagcaatgggcagccggagaacaactacaagaccacgcctcccgtgctggactccgacggctccttcttcctctacagcaagctcaccgtggacaagagcaggtggcagcaggggaacgtcttctcatgctccgtgatgcatgaggctctgcacaaccactacacgcagaagagcctctccctgtctccgggtaaatgatctaga

SEQ ID NO: 396 - protein, 500 aa, Artificial Sequence
  fusion polypeptide
MDFQVQIFSFLLISASVIIARGQIVLSQSPAILSASPGEKVTMTCRASSSVSYMHWYQQKPGSSPKPWIYAPSNLASGVPARFSGSGSGTSYSLTISRVEAEDAATYYCQQWSFNPPTFGAGTKLELKDGGGSGGGGSGGGGSSQAYLQQSGAELVRPGASVKMSCKASGYTFTSYNMHWVKQTPRQGLEWIGAIYPGNGDTSYNQKFKGKATLTVDKSSSTAYMQLSSLTSEDSAVYFCARVVYYSNSYWYFDVWGTGTTVTVSSDQEPKSSDKTHTCPPCPAPELLGGPSVFLFPPKPKDTLMISRTPEVTCVVVDVSHEDPEVKFNWYVDGVEVHNAKTKPREEQYNSTYRVVSVLTVLHQDWLNGKEYKCKVSNKALPAPIEKTISKAKGQPREPQVYTLPPSRDELTKNQVSLTCLVKGFYPSDIAVEWESNGQPENNYKTTPPVLDSDGSFFLYSKLTVDKSRWQQGNVFSCSVMHEALHNHYTQKSLSLSPGK

SEQ ID NO: 397 - protein, 500 aa, Artificial Sequence
  fusion polypeptide
MDFQVQIFSFLLISASVIIARGQIVLSQSPAILSASPGEKVTMTCRASSSVSYMHWYQQKPGSSPKPWIYAPSNLASGVPARFSGSGSGTSYSLTISRVEAEDAATYYCQQWSFNPPTFGAGTKLELKDGGGSGGGGSGGGGSSQAYLQQSGAELVRPGASVKMSCKASGYTFTSYNMHWVKQTPRQGLEWIGAIYPGNGDTSYNQKFKGKATLTVDKSSSTAYMQLSSLTSEDSAVYFCARVVYYSNSYWYFDVWGTGTTVTVSSDQEPKSCDKTHTSPPCPAPELLGGPSVFLFPPKPKDTLMISRTPEVTCVVVDVSHEDPEVKFNWYVDGVEVHNAKTKPREEQYNSTYRVVSVLTVLHQDWLNGKEYKCKVSNKALPAPIEKTISKAKGQPREPQVYTLPPSRDELTKNQVSLTCLVKGFYPSDIAVEWESNGQPENNYKTTPPVLDSDGSFFLYSKLTVDKSRWQQGNVFSCSVMHEALHNHYTQKSLSLSPGK

SEQ ID NO: 398 - protein, 500 aa, Artificial Sequence
  fusion polypeptide
MDFQVQIFSFLLISASVIIARGQIVLSQSPAILSASPGEKVTMTCRASSSVSYMHWYQQKPGSSPKPWIYAPSNLASGVPARFSGSGSGTSYSLTISRVEAEDAATYYCQQWSFNPPTFGAGTKLELKDGGGSGGGGSGGGGSSQAYLQQSGAELVRPGASVKMSCKASGYTFTSYNMHWVKQTPRQGLEWIGAIYPGNGDTSYNQKFKGKATLTVDKSSSTAYMQLSSLTSEDSAVYFCARVVYYSNSYWYFDVWGTGTTVTVSSDQEPKSCDKTHTCPPSPAPELLGGPSVFLFPPKPKDTLMISRTPEVTCVVVDVSHEDPEVKFNWYVDGVEVHNAKTKPREEQYNSTYRVVSVLTVLHQDWLNGKEYKCKVSNKALPAPIEKTISKAKGQPREPQVYTLPPSRDELTKNQVSLTCLVKGFYPSDIAVEWESNGQPENNYKTTPPVLDSDGSFFLYSKLTVDKSRWQQGNVFSCSVMHEALHNHYTQKSLSLSPGK

SEQ ID NO: 399 - DNA, 793 bp, Artificial Sequence
  fusion polynucleotide
atgttgtatacatctcagctccttgggcttttactcttctggatttcagcctccagaagtgacatagtgctgactcagactccagccactctgtctctaattcctggagaaagagtcacaatgacctgtaagaccagtcagaatattggcacaatcttacactggtatcaccaaaaaccaaaggaggctccaagggctctcatcaagtatgcttcgcagtccattcctgggatcccctccagattcagtggcagtggttcggaaacagatttcactctcagcatcaataacctggagcctgatgatatcggaatttattactgtcaacaaagtagaagctggcctgtcacgttcggtcctggcaccaagctggagataaaacggggtggcggtggctcgggcggaggtgggtcgggtggcggcggatctcaggtcaagctgcagcagtccggttctgaactagggaaacctggggcctcagtgaaactgtcctgcaagacttcaggctacatattcacagatcactatatttcttgggtgaaacagaagcctggagaaagcctgcagtggataggaaatgtttatggtggaaatggtggtacaagctacaatcaaaaattccagggcaaggccacactgactgtagataaaatctctagcacagcctacatggaactcagcagcctgacatctgaggattctgccatctattactgtgcaagaaggccggtagcgacgggccatgctatggactactggggtcaggggatccaagttaccgtctcctctgatc

SEQ ID NO: 400 - protein, 264 aa, Artificial Sequence
  fusion polypeptide
MLYTSQLLGLLLFWISASRSDIVLTQTPATLSLIPGERVTMTCKTSQNIGTILHWYHQKPKEAPRALIKYASQSIPGIPSRFSGSGSETDFTLSINNLEPDDIGIYYCQQSRSWPVTFGPGTKLEIKRGGGGSGGGGSGGGGSQVKLQQSGSELGKPGASVKLSCKTSGYIFTDHYISWVKQKPGESLQWIGNVYGGNGGTSYNQKFQGKATLTVDKISSTAYMELSSLTSEDSAIYYCARRPVATGHAMDYWGQGIQVTVSSD

SEQ ID NO: 401 - DNA, 36 bp, Artificial Sequence
  oligonucleotide primer
gttgttgatcagccagttccctcaactccacctacc

SEQ ID NO: 402 - DNA, 44 bp, Artificial Sequence
  oligonulceotide primer
gttgttttcgaaggatccgcgtccacctccgccatgacaacaga

SEQ ID NO: 403 - DNA, 47 bp, Artificial Sequence
  oligonucleotide primer
gttgttttcgaaggatccgctttacccggagacagggagaggctctt

SEQ ID NO: 404 - DNA, 45 bp, Artificial Sequence
  oligonulceotide primer
gttgttagatctggagcccaaatcttgtgacaaaactcacacatg

SEQ ID NO: 405 - DNA, 48 bp, Artificial Sequence
  oligonucleotide primer
gttgtggatccttcgaacccgttcctggtgctgctgcactcggtgtcg

SEQ ID NO: 406 - DNA, 48 bp, Artificial Sequence
  oligonucleotide
gttgttatcgatctcgagttatcaggacgcttcggaggtagatgcgtc

SEQ ID NO: 407 - DNA, 657 bp, Artificial Sequence
  fusion polynucleotide
gtggatccttcgaacccgttcctggtgctgctgcactcggtgtcgtccagcctgtcgagcagcgagctgaccgagctcaagttcctatgcctcgggcgcgtgggcaagcgcaagctggagcgcgtgcagagcggcctagacctcttctccatgctgctggagcagaacgacctggagcccgggcacaccgagctcctgcgcgagctgctcgcctccctgcggcgccacgacctgctgcggcgcgtcgacgacttcgaggcgggggcggcggccggggccgcgcctggggaagaagacctgtgtgcagcatttaacgtcatatgtgataatgtggggaaagattggagaaggctggctcgtcagctcaaagtctcagacaccaagatcgacagcatcgaggacagatacccccgcaacctgacagagcgtgtgcgggagtcactgagaatctggaagaacacagagaaggagaacgcaacagtggcccacctggtgggggctctcaggtcctgccagatgaacctggtggctgacctggtacaagaggttcagcaggcccgtgacctccagaacaggagtggggccatgtccccgatgtcatggaactcagacgcatctacctccgaagcgtcctgataactcgagatcgataacaac

SEQ ID NO: 408 - protein, 211 aa, Artificial Sequence
  fusion polypeptide
VDPSNPFLVLLHSVSSSLSSSELTELKFLCLGRVGKRKLERVQSGLDLFSMLLEQNDLEPGHTELLRELLASLRRHDLLRRVDDFEAGAAAGAAPGEEDLCAAFNVICDNVGKDWRRLARQLKVSDTKIDSIEDRYPRNLTERVRESLRIWKNTEKENATVAHLVGALRSCQMNLVADLVQEVQQARDLQNRSGAMSPMSWNSDASTSEAS

SEQ ID NO: 409 - DNA, 60 bp, Artificial Sequence
  oligonucleotide
gttgtggatcctcccttttgggtgctggtggtggttggtgtcctggcttgctatagcttg

SEQ ID NO: 410 - DNA, 60 bp, Artificial Sequence
  oligonucleotide
gttgtttcgaacccagaaaataataaaggccactgttactagcaagctatagcaagccag

SEQ ID NO: 411 - DNA, 32 bp, Artificial Sequence
  oligonucleotide
gttgtggatcctcccttttgggtgctggtggt

SEQ ID NO: 412 - DNA, 33 bp, Artificial Sequence
  oligonucleotide
gttgtttcgaacccagaaaataataaaggccac

SEQ ID NO: 413 - DNA, 28 bp, Artificial Sequence
  oligonucleotide
gttgtggatcctcctgctcccatcctgg

SEQ ID NO: 414 - DNA, 32 bp, Artificial Sequence
  oligonucleotide
gttgtttcgaacggcaaagcagtaggtcaggc

SEQ ID NO: 415 - DNA, 45 bp, Artificial Sequence
  oligonucleotide
gttgtggatccttcgaacccattcctggtgctgctgcactcgctg

SEQ ID NO: 416 - DNA, 42 bp, Artificial Sequence
  oligonucleotide
gttgttatcgatctcgagtcagggtgtttctgaggaagacac

SEQ ID NO: 417 - DNA, 645 bp, Artificial Sequence
  fusion polynucleotide
gtggatccttcgaacatggacccattcctggtgctgctgcactcgctgtccggcagcctgtcgggcaacgatctgatggagctcaagttcttgtgccgcgagcgcgtgagcaaacgaaagctggagcgcgtgcagagtggcctggacctgttcacggtgctgctggagcagaacgacctggagcgcgggcacaccgggctgctgcgcgagttgctggcctcgctgcgccgacacgatctactgcagcgcctggacgacttcgaggcggggacggcgaccgctgcgcccccgggggaggcagatctgcaggtggcatttgacattgtgtgtgacaatgtggggagagactggaaaagactggcccgcgagctgaaggtgtctgaggccaagatggatgggattgaggagaagtacccccgaagtctgagtgagcgggtaagggagagtctgaaagtctggaagaatgctgagaagaagaacgcctcggtggccggactggtcaaggcgctgcggacctgcaggctgaatctggtggctgacctggtggaagaagcccaggaatctgtgagcaagagtgagaatatgtccccagtactaagggattcaactgtgtcttcctcagaaacaccctgactcgagatcgat

SEQ ID NO: 418 - protein, 210 aa, Artificial Sequence
  fusion polypeptide
VDPSNMDPFLVLLHSLSGSLSGNDLMELKFLCRERVSKRKLERVQSGLDLFTVLLEQNDLERGHTGLLRELLASLRRHDLLQRLDDFEAGTATAAPPGEADLQVAFDIVCDNVGRDWKRLARELKVSEAKMDGIEEKYPRSLSERVRESLKVWKNAEKKNASVAGLVKALRTCRLNLVADLVEEAQESVSKSENMSPVLRDSTVSSSETP

SEQ ID NO: 419 - DNA, 48 bp, Artificial Sequence
  oligonucleotide
gttgtggatccttcgaacatggagaacaacaaaacctcagtggattca

SEQ ID NO: 420 - DNA, 44 bp, Artificial Sequence
  oligonucleotide
gttgttatcgatctcgagctagtgataaaagtacagttctttcg

SEQ ID NO: 421 - DNA, 46 bp, Artificial Sequence
  oligonucleotide
gttgtttcgaacatggatttccagagttgtctttatgctattgctg

SEQ ID NO: 422 - DNA, 48 bp, Artificial Sequence
  oligonucleotide
gttgttatcgatctcgagtcattagggagggaagaagagcttcttccg

SEQ ID NO: 423 - DNA, 45 bp, Artificial Sequence
  oligonucleotide
gttgtggatccttcgaacatggagaacactgaaaactcagtggat

SEQ ID NO: 424 - DNA, 48 bp, Artificial Sequence
  oligonucleotide
gttgttatcgatctcgagttagtgataaaaatagagttcttttgtgag

SEQ ID NO: 425 - DNA, 45 bp, Artificial Sequence
  oligonucleotide
gttgtggatccttcgaacatggacttcagcagaaatctttatgat

SEQ ID NO: 426 - DNA, 48 bp, Artificial Sequence
  oligonucleotide
gttgttatcgatgcatgctcaatcagaagggaagacaagtttttttct
